United States Patent Application Publication US 2024/0117440 A1 - sequence listing, part 2

SEQ ID NO: 7447 - DNA, 121 bp, synthetic construct
  misc_feature 1..121: note = Description of artificial sequence: synthetic polynucleotide sequence
  source 1..121: mol_type = other DNA
tctttcaaacacacacatctcaattattgtttcaggattatccatcctatacagcctttggccaaaaccagtatgcacagtattattcagcatcaacgtatggagcgtatatgacatcgaa

SEQ ID NO: 7448 - DNA, 121 bp, synthetic construct
  misc_feature 1..121: note = Description of artificial sequence: synthetic polynucleotide sequence
  source 1..121: mol_type = other DNA
gattctatgtagtgagtcccattgggtcacctgaagaacaactgaccaccaatgaaaagaccaagatacatataattgatttccataatggatgttctcctgactcccaaatctaatttta

SEQ ID NO: 7449 - DNA, 121 bp, synthetic construct
  misc_feature 1..121: note = Description of artificial sequence: synthetic polynucleotide sequence
  source 1..121: mol_type = other DNA
tagcaatttgaggtaaatctattcattgataacttacataagatttagtttggtttcaatgtttttcacaatctttatccatgctttatgatgccctcataagtatcaattcatgttagaa

SEQ ID NO: 7450 - DNA, 121 bp, synthetic construct
  misc_feature 1..121: note = Description of artificial sequence: synthetic polynucleotide sequence
  source 1..121: mol_type = other DNA
agctaaatttggtgccagacgcttagcccgtagtctgcagaaactaggttttcaggtaacgttttcaaatagtatctaaactacaaatattcaaggacttatttttatagaattaaaaatt

SEQ ID NO: 7451 - DNA, 169 bp, synthetic construct
  misc_feature 1..169: note = Description of artificial sequence: synthetic polynucleotide sequence
  source 1..169: mol_type = other DNA
ttcagaggaaagagtccgtgggaggcgcataggaaaagcctaggaaagcctcggcagcttccttgacgctggctgtgacgaggacgctgtcaggggacttgccaatggagttggggacaggctcttcggtaaactcggggtcaaagtgccgtaggtcgttgggcccact

SEQ ID NO: 7452 - DNA, 121 bp, synthetic construct
  misc_feature 1..121: note = Description of artificial sequence: synthetic polynucleotide sequence
  source 1..121: mol_type = other DNA
agagacagatactcaccacatttgggttaaaagggggagtaatcttcttattaatgagatcatcccagttaattaaggagaagaagacatgactcttaatctccatctgttgataagaaac

SEQ ID NO: 7453 - DNA, 157 bp, synthetic construct
  misc_feature 1..157: note = Description of artificial sequence: synthetic polynucleotide sequence
  source 1..157: mol_type = other DNA
cgaagtcatccttggccccgagccgctttgtcctgtccttctgcaggaggccctccaggaggtgtcttgcggaatttgtaatatttggtttcagctggagaggcttgttcagaatgttgtcgtacatttcagctgtgtttcggctataaaaaggcgg

SEQ ID NO: 7454 - DNA, 121 bp, synthetic construct
  misc_feature 1..121: note = Description of artificial sequence: synthetic polynucleotide sequence
  source 1..121: mol_type = other DNA
atgtgccactcaccaggccatacagcatctcatacaagacagctcccaggcaccaccagtccacagtcctgtcataaggctgcttatgaagcacctcaggtgcgagatactgaaaaacaga

SEQ ID NO: 7455 - DNA, 121 bp, synthetic construct
  misc_feature 1..121: note = Description of artificial sequence: synthetic polynucleotide sequence
  source 1..121: mol_type = other DNA
tccggcgtgccacagaaggtggatgttgtgctgttgtgttcaatgttctccttgcagagtccgaagtcagtaaggacaatgtgtccctgtgaatctagcaaaatattctctggttttaagt

SEQ ID NO: 7456 - DNA, 121 bp, synthetic construct
  misc_feature 1..121: note = Description of artificial sequence: synthetic polynucleotide sequence
  source 1..121: mol_type = other DNA
ttacctataaacgatgttcagtgaatgcaggtagcccaaggcactggctatttcagcagcatagaaacgagcccgtggttccaggaagcagcgttccctctggagatggtagaacaactgc

SEQ ID NO: 7457 - DNA, 133 bp, synthetic construct
  misc_feature 1..133: note = Description of artificial sequence: synthetic polynucleotide sequence
  source 1..133: mol_type = other DNA
cctctccaccattaatgtagtctaggacaaagtacaatttgtcagcagtctggaaagagaagtgaaggcccaccaggaaagggtgcttcacattcttcaacagaacattccgctccgacataatatgcttctc

SEQ ID NO: 7458 - DNA, 121 bp, synthetic construct
  misc_feature 1..121: note = Description of artificial sequence: synthetic polynucleotide sequence
  source 1..121: mol_type = other DNA
catcaagcacatctcatacctctttctttttcaggattgctttcttctgtaaaactttgactgcatagaacacttcttctgccttgtgtcttgctagaagaacctgaaatttcaatttaaa

SEQ ID NO: 7459 - DNA, 121 bp, synthetic construct
  misc_feature 1..121: note = Description of artificial sequence: synthetic polynucleotide sequence
  source 1..121: mol_type = other DNA
gaaattacctttccaaaactgccctttccgatcactttcaagaagtgaaagtcagatggtttagcatgaggattggacgacgggccaaggttgatttgctgagaaggacttggctagaaaa

SEQ ID NO: 7460 - DNA, 121 bp, synthetic construct
  misc_feature 1..121: note = Description of artificial sequence: synthetic polynucleotide sequence
  source 1..121: mol_type = other DNA
gcacggcacatacaaaaacttactggaggagaagggttggcattcataagctcaggctcctgaggttgggagatcttcaagatggactgaacttcagggctgcagggaataaagggcacga

SEQ ID NO: 7461 - DNA, 121 bp, synthetic construct
  misc_feature 1..121: note = Description of artificial sequence: synthetic polynucleotide sequence
  source 1..121: mol_type = other DNA
tcctcaaatccggtcaaacttactgtttgcatgcataggagttattggcaatcttctgaataaagtcgttcagacccatcctcctctgcttcatgaaagctgtggatgaaggaggagaaat

SEQ ID NO: 7462 - DNA, 121 bp, synthetic construct
  misc_feature 1..121: note = Description of artificial sequence: synthetic polynucleotide sequence
  source 1..121: mol_type = other DNA
tcccgcaagattcctgcactcaccgatgagaattgccaccatgcccctcatcctggagtaagtgagggtgcccttagcagcctcagttttcaccgtcatcaccaccgcggggagacagaaa

SEQ ID NO: 7463 - DNA, 121 bp, synthetic construct
  misc_feature 1..121: note = Description of artificial sequence: synthetic polynucleotide sequence
  source 1..121: mol_type = other DNA
acccagtccgctcagcaggaaggactcgctccttttctgcgcctcggccctctttttgtggcggggccgcagcagggactcgagccgggctctggccagcgcgccctgcatctcccccatg

SEQ ID NO: 7464 - DNA, 161 bp, synthetic construct
  misc_feature 1..161: note = Description of artificial sequence: synthetic polynucleotide sequence
  source 1..161: mol_type = other DNA
cctttcaaagggggttttatagcttcttctttcattcttcgggttgcccaaggatatgcaggttggggattacttctggaggctggaggtagagcccagttatggctggaataagcctccctgctacatgcctctgataagctggaactctgagatgacat

SEQ ID NO: 7465 - DNA, 121 bp, synthetic construct
  misc_feature 1..121: note = Description of artificial sequence: synthetic polynucleotide sequence
  source 1..121: mol_type = other DNA
aggttgtatttttccaataatacctggatcatcattagtccagaaggttcttggatcgggcttggtcaggatgttggcatgattacatggctctctcacctttaaaacataaagagaaaag

SEQ ID NO: 7466 - DNA, 217 bp, synthetic construct
  misc_feature 1..217: note = Description of artificial sequence: synthetic polynucleotide sequence
  source 1..217: mol_type = other DNA
cttcacacccagattgagtttcccatgaacatgactcgttctcctgagggagaacccctctttggaaagcatgttcacccaggcatgtttgacacaaggaagactcgaagtctggctcccctggagggatgtgcaccatggaggagccggtgtacttcaggctgggactctgatgcttgtccacactgaccattgggctcttgatccaccttcgtac

SEQ ID NO: 7467 - DNA, 121 bp, synthetic construct
  misc_feature 1..121: note = Description of artificial sequence: synthetic polynucleotide sequence
  source 1..121: mol_type = other DNA
aagaaataagcaaaacctgtccttacccgcttcttaaaaaattggaaggctgagcatttcttgactgggaatccattcatgtctttgtttaccattttccaccgtggggaattcacagtta

SEQ ID NO: 7468 - DNA, 121 bp, synthetic construct
  misc_feature 1..121: note = Description of artificial sequence: synthetic polynucleotide sequence
  source 1..121: mol_type = other DNA
acagaaaccagataaattgagcctactagttagacttgatgattagctaggctgatgatgtggtgagtttctcctgacttatatctgaatgtccctttgcctagacgtttctctccattga

SEQ ID NO: 7469 - DNA, 121 bp, synthetic construct
  misc_feature 1..121: note = Description of artificial sequence: synthetic polynucleotide sequence
  source 1..121: mol_type = other DNA
acagggttttaagcacaaaactgacatgattagacttgatttcagttagcaatatggaggaatttcaaaagcattgaagactgaagatgcaaagaaccagttagtaggtagttattataat

SEQ ID NO: 7470 - DNA, 121 bp, synthetic construct
  misc_feature 1..121: note = Description of artificial sequence: synthetic polynucleotide sequence
  source 1..121: mol_type = other DNA
cctacctaactgcagcaggcattgttctggctttctacaccccagggatgctttgagttgcttaaatgctcataaactgtttctgcctagcatatttgcacattctttcctctgtcaggaa

SEQ ID NO: 7471 - DNA, 121 bp, synthetic construct
  misc_feature 1..121: note = Description of artificial sequence: synthetic polynucleotide sequence
  source 1..121: mol_type = other DNA
acaacaccagcagctattgtagaaccaccgtaacgtagcatgaacctccccagctctttaaagtctttatatagctcaagagctattggtctttgtgtctgtagctctaccaatgcattct

SEQ ID NO: 7472 - DNA, 121 bp, synthetic construct
  misc_feature 1..121: note = Description of artificial sequence: synthetic polynucleotide sequence
  source 1..121: mol_type = other DNA
ttgcaggtaattactattccaacattggtattttaaaattcattcactgaaaaactgtcatctttggtggtggtggtggtggtggtgatggtagtgctggtggtctgtttttcgttttcaa

SEQ ID NO: 7473 - DNA, 121 bp, synthetic construct
  misc_feature 1..121: note = Description of artificial sequence: synthetic polynucleotide sequence
  source 1..121: mol_type = other DNA
aaatatatgactattattgaaagagctacagaaaggaactctgtacaattcatggtacacggccaagaaaagatcattttgaaagagaaactagtaaaagtcgatgtattatggacaattt

SEQ ID NO: 7474 - DNA, 121 bp, synthetic construct
  misc_feature 1..121: note = Description of artificial sequence: synthetic polynucleotide sequence
  source 1..121: mol_type = other DNA
ctacttctatttttgaaaagtgatattgagaatttaattgtaattagtttcaaggaaagcgtatgagtaacaatactctgttacaaagtcaaaacattccgtagaaaatagctatgagtct

SEQ ID NO: 7475 - DNA, 121 bp, synthetic construct
  misc_feature 1..121: note = Description of artificial sequence: synthetic polynucleotide sequence
  source 1..121: mol_type = other DNA
ggccttcaagcctgcccagctcacatttgcttatgttttctgctgcttaaataataacaattcagcaaagttaagtgaggactgtctctcaatgtctaatatttattaacgagctatgtta

SEQ ID NO: 7476 - DNA, 121 bp, synthetic construct
  misc_feature 1..121: note = Description of artificial sequence: synthetic polynucleotide sequence
  source 1..121: mol_type = other DNA
ccccttcccttttattctttccttcttcttggagtccctcttatttgagtgatccctgaaaagggtactcactgctaagaagaacgacctgggttacataacaagtccttacagaacaatg

SEQ ID NO: 7477 - DNA, 121 bp, synthetic construct
  misc_feature 1..121: note = Description of artificial sequence: synthetic polynucleotide sequence
  source 1..121: mol_type = other DNA
ggccggggccagggtggggtgcggccgcacctgcctctgggcgcgctctgcctcctcccgctcgcgcagcgcccgctcctccgcctgccgctgcagctgctcctccttctcccgggcctgc

SEQ ID NO: 7478 - DNA, 121 bp, synthetic construct
  misc_feature 1..121: note = Description of artificial sequence: synthetic polynucleotide sequence
  source 1..121: mol_type = other DNA
acaagttcttgcttggccacaggctgttctgtggtcagtttcacaaaatgcttatatattaaaattgtctctacaatagacttgaggtacctgagaaggaaaagatataaaacatgtaaca

SEQ ID NO: 7479 - DNA, 121 bp, synthetic construct
  misc_feature 1..121: note = Description of artificial sequence: synthetic polynucleotide sequence
  source 1..121: mol_type = other DNA
gaggaggtggccgccggacaaccgatgccaggggcagcggcgctctccacgttccagaagctgcccggcggcggcggtggcagctggtgctcctcgccctcgcccaccgccgccgctcctc

SEQ ID NO: 7480 - DNA, 121 bp, synthetic construct
  misc_feature 1..121: note = Description of artificial sequence: synthetic polynucleotide sequence
  source 1..121: mol_type = other DNA
atattcaatgactgttttatccgggggtattgttctgctgagggactcttgctgggtgagagaagtaccttccgtgttttcttcagagtcacaaaaaatttccatcaaatgcgaagcatac

SEQ ID NO: 7481 - DNA, 121 bp, synthetic construct
  misc_feature 1..121: note = Description of artificial sequence: synthetic polynucleotide sequence
  source 1..121: mol_type = other DNA
ccggctggggcggatccctccctccctctcgtcccgacccggccgcagccctgccgcgaacgacggtacctgaggacggccccagatccgcggtgcccatctcagccctgctcacaccctg

SEQ ID NO: 7482 - DNA, 121 bp, synthetic construct
  misc_feature 1..121: note = Description of artificial sequence: synthetic polynucleotide sequence
  source 1..121: mol_type = other DNA
aaagaaagagggtcagagagtgctcttctgcttttgtggttttctcgatttctttcagccgtaaatactcagtatgcccaggtgtcattgtagaagatgagaatggaaggcacagaaagaa

SEQ ID NO: 7483 - DNA, 121 bp, synthetic construct
  misc_feature 1..121: note = Description of artificial sequence: synthetic polynucleotide sequence
  source 1..121: mol_type = other DNA
catcgccaaaagcatccttaatgatgagtaaggtagagagtttcagcagagtgtgagcctatagcatatgggatttctagatttcaccatttgcaaaatgagacagaatcatcctcctaat

SEQ ID NO: 7484 - DNA, 296 bp, synthetic construct
  misc_feature 1..296: note = Description of artificial sequence: synthetic polynucleotide sequence
  source 1..296: mol_type = other DNA
aatggctgaacaagtccttcctcaggctttgtatttgagcaatatgcggaaagctgtgaagatacgggagagaactccagaagacatttttaaacctactaatgggatcattcatcattttaaaaccatgcaccgatacacactggaaatgttcagaacttgccagttttgtcctcagtttcgggagatcatccacaaagccctcatcgacagaaacatccaggccaccctggaaagccagaagaaactcaactggtgtcgagaagtccggaagcttgtggcgctgaaaacgaacg

SEQ ID NO: 7485 - DNA, 192 bp, synthetic construct
  misc_feature 1..192: note = Description of artificial sequence: synthetic polynucleotide sequence
  source 1..192: mol_type = other DNA
ggtgacggcaattgcctcatgcatgccacttctcagtacatgtggggcgttcaggacacagacttggtactgaggaaggcgctgttcagcacgctcaaggaaacagacacacgcaactttaaattccgctggcaactggagtctctcaaatctcaggaatttgttgaaacggggctttgctatgatactcgg

SEQ ID NO: 7486 - DNA, 149 bp, synthetic construct
  misc_feature 1..149: note = Description of artificial sequence: synthetic polynucleotide sequence
  source 1..149: mol_type = other DNA
gaactggaatgatgaatgggacaatcttatcaaaatggcttccacagacacacccatggcccgaagtggacttcagtacaactcactggaagaaatacacatatttgtcctttgcaacatcctcagaaggccaatcattgtcatttcag

SEQ ID NO: 7487 - DNA, 172 bp, synthetic construct
  misc_feature 1..172: note = Description of artificial sequence: synthetic polynucleotide sequence
  source 1..172: mol_type = other DNA
gacaaaatgctaagaagtttggaatcaggttccaatttcgcccctttgaaagtgggtggaatttacttgcctctccactggcctgcccaggaatgctacagataccccattgttctcggctatgacagccatcattttgtacccttggtgaccctgaaggacagtgggcctg

SEQ ID NO: 7488 - DNA, 182 bp, synthetic construct
  misc_feature 1..182: note = Description of artificial sequence: synthetic polynucleotide sequence
  source 1..182: mol_type = other DNA
gaaatccgagctgttccacttgttaacagagaccggggaagatttgaagacttaaaagttcactttttgacagatcctgaaaatgagatgaaggagaagctcttaaaagagtacttaatggtgatagaaatccccgtccaaggctgggaccatggcacaactcatctcatcaatgccgcaaa

SEQ ID NO: 7489 - DNA, 457 bp, synthetic construct
  misc_feature 1..457: note = Description of artificial sequence: synthetic polynucleotide sequence
  source 1..457: mol_type = other DNA
ggttggatgaagctaacttaccaaaagaaatcaatctggtagatgattactttgaacttgttcagcatgagtacaagaaatggcaggaaaacagcgagcaggggaggagagaggggcacgcccagaatcccatggaaccttccgtgccccagctttctctcatggatgtaaaatgtgaaacgcccaactgccccttcttcatgtctgtgaacacccagcctttatgccatgagtgctcagagaggcggcaaaagaatcaaaacaaactcccaaagctgaactccaagccgggccctgaggggctccctggcatggcgctcggggcctctcggggagaagcctatgagcccttggcgtggaaccctgaggagtccactggggggcctcattcggccccaccgacagcacccagcccttttctgttcagtgagaccactgccatgaagtgcaggagccc

SEQ ID NO: 7490 - DNA, 464 bp, synthetic construct
  misc_feature 1..464: note = Description of artificial sequence: synthetic polynucleotide sequence
  source 1..464: mol_type = other DNA
cggctgccccttcacactgaatgtgcagcacaacggattttgtgaacgttgccacaacgcccggcaacttcacgccagccacgccccagaccacacaaggcacttggatcccgggaagtgccaagcctgcctccaggatgttaccaggacatttaatgggatctgcagtacttgcttcaaaaggactacagcagaggcctcctccagcctcagcaccagcctccctccttcctgtcaccagcgttccaagtcagatccctcgcggctcgtccggagcccctccccgcattcttgccacagagctggaaacgacgcccctgctggctgcctgtctcaagctgcacggactcctggggacaggacggggacgagcaagtgcagaaaagccggctgcgtgtattttgggactccagaaaacaagggcttttgcacactgtgtttcatcgagtacagagaaaacaaac

SEQ ID NO: 7491 - DNA, 183 bp, synthetic construct
  misc_feature 1..183: note = Description of artificial sequence: synthetic polynucleotide sequence
  source 1..183: mol_type = other DNA
gattttgctgctgcctcagggaaagtcagtcccacagcgtccaggttccagaacaccattccgtgcctggggagggaatgcggcacccttggaagcaccatgtttgaaggatactgccagaagtgtttcattgaagctcagaatcagagatttcatgaggccaaaaggacagaagagcaactg

SEQ ID NO: 7492 - DNA, 286 bp, synthetic construct
  misc_feature 1..286: note = Description of artificial sequence: synthetic polynucleotide sequence
  source 1..286: mol_type = other DNA
gagatcgagccagcgcagagatgtgcctcgaaccacacaaagcacctcaaggcccaagtgcgcccgggcctcctgcaagaacatcctggcctgccgcagcgaggagctctgcatggagtgtcagcatcccaaccagaggatgggccctggggcccaccggggtgagcctgcccccgaagacccccccaagcagcgttgccgggcccccgcctgtgatcattttggcaatgccaagtgcaacggctactgcaacgaatgctttcagttcaagcagatgtatggctaa

SEQ ID NO: 7493 - DNA, 121 bp, synthetic construct
  misc_feature 1..121: note = Description of artificial sequence: synthetic polynucleotide sequence
  source 1..121: mol_type = other DNA
gcattgcccagaaggtcatcttcgtagttggggaggcagcagaagaagaaggcacagccaatcaggataatcgtggctgcccacccaaagccgtaggcccagttatagatgtaagtgacag

SEQ ID NO: 7494 - DNA, 121 bp, synthetic construct
  misc_feature 1..121: note = Description of artificial sequence: synthetic polynucleotide sequence
  source 1..121: mol_type = other DNA
atcagcacagcgccaggctgttcatacagtccctggaaggcctcctccctcggctcctgtctctctccaatgtagaggaggtggacaccgctctgcagaactttgcctctactttctgctc

SEQ ID NO: 7495 - DNA, 121 bp, synthetic construct
  misc_feature 1..121: note = Description of artificial sequence: synthetic polynucleotide sequence
  source 1..121: mol_type = other DNA
tgcatgaggagaaaccacacacgctgggctcattatattttcactctcgaagtgtctcaactcctgggatttgggtctcaaaagtgttccagtccctgaggcacctcctaaatggcctaag

SEQ ID NO: 7496 - DNA, 121 bp, synthetic construct
  misc_feature 1..121: note = Description of artificial sequence: synthetic polynucleotide sequence
  source 1..121: mol_type = other DNA
acaggcagaattccaataaagcacagttttcttccatagttgcaacctcaaaaaaagtgctgaaattcaaataatcttaagttctgccgcctgtacacataggaatattctccttataatg

SEQ ID NO: 7497 - DNA, 121 bp, synthetic construct
  misc_feature 1..121: note = Description of artificial sequence: synthetic polynucleotide sequence
  source 1..121: mol_type = other DNA
tatttaggtcttaagaagctggccgtggtgcaataaggaacttaaaacaatggaagagcggaaagtgaagaggaggagtcctaagtcttttagtgcccactgtactcaggttgtcaatgcc

SEQ ID NO: 7498 - DNA, 121 bp, synthetic construct
  misc_feature 1..121: note = Description of artificial sequence: synthetic polynucleotide sequence
  source 1..121: mol_type = other DNA
atgccattccagtgagtaaaagcacagggttttcaaatcctgcatcacagtcaacttcacagcgaccaaagttaaaaaggtgaattcttttattttacatgttcacagtaaaatgccatta

SEQ ID NO: 7499 - DNA, 121 bp, synthetic construct
  misc_feature 1..121: note = Description of artificial sequence: synthetic polynucleotide sequence
  source 1..121: mol_type = other DNA
tggggattcttcctggagaactccagaaatggagagcttccacaccagatttagtgcctggacaccttttagcaacaagtcattaaatagacaggtaagttacatactttaaaacagaaca

SEQ ID NO: 7500 - DNA, 121 bp, synthetic construct
  misc_feature 1..121: note = Description of artificial sequence: synthetic polynucleotide sequence
  source 1..121: mol_type = other DNA
atagctctttcaggaaagagtggctcttataagtcattggtttgacctctggactaacaagcaacgtcaagaattcttattcgcaatttttttaagatgcactaaatcacaattaaggtaa

SEQ ID NO: 7501 - DNA, 164 bp, synthetic construct
  misc_feature 1..164: note = Description of artificial sequence: synthetic polynucleotide sequence
  source 1..164: mol_type = other DNA
ggtttgtccaagactggttttcagaaaggatgcaagtggccaaagtggacttctctacagtgttaccacgcttcatttctctatatatcttttcctttttgagtccgaaagatttgtgtgccgctgcccaagtcagctggccctggaagtttttaactgaacag

SEQ ID NO: 7502 - DNA, 254 bp, synthetic construct
  misc_feature 1..254: note = Description of artificial sequence: synthetic polynucleotide sequence
  source 1..254: mol_type = other DNA
ggattgcttatggatgcccaaatgcgttaagttcggatggtttctgccctatactccaacagataatgagtatggtgcttggaagcgccattacattgcttgtgtgtcccacttagactggctgacacctagggaggctgctgctacttatgggacgctgaatgaacccaaaacagaagatgaggaactactggagagacaaagagaaaagtgcctgaggaaaagaatttgggagaaaattgcactacgtaaga

SEQ ID NO: 7503 - DNA, 170 bp, synthetic construct
  misc_feature 1..170: note = Description of artificial sequence: synthetic polynucleotide sequence
  source 1..170: mol_type = other DNA
gaggagttattcaaagttcgacccccttgggtgagtggaacttgctgctctagcgtgctaaagcccagatgccaaccacgcctctcccagactgtaagggagcgagtgggattacatgaagctttggagaaacagcttgttttgacatcgttagaaaccttgcccaagcg

SEQ ID NO: 7504 - DNA, 140 bp, synthetic construct
  misc_feature 1..140: note = Description of artificial sequence: synthetic polynucleotide sequence
  source 1..140: mol_type = other DNA
gaagcaatatttctggaagccattcctaccctttattatcaaagaaaaattggcatggagttcataaaaatgatgacagatcttcatatgctctccggccacacttcatgttaatatcatcccggattcctgcgtatgag

SEQ ID NO: 7505 - DNA, 167 bp, synthetic construct
  misc_feature 1..167: note = Description of artificial sequence: synthetic polynucleotide sequence
  source 1..167: mol_type = other DNA
gatggtgatggagagtgtgaaggctggtgttgtttctgtggtatatgaacacagcgtaaccttggaaagccttctgtatcttatagaaaaagctctggatgggcagaaggcacagagcatcggaatatttagcgatggagacagcagagaaatcaatttactccaag

SEQ ID NO: 7506 - DNA, 121 bp, synthetic construct
  misc_feature 1..121: note = Description of artificial sequence: synthetic polynucleotide sequence
  source 1..121: mol_type = other DNA
taaaattggtgttaaaaatttactgaggcctgaagtgagagatttctgggagaaattaggaagctatgtggccactgaagaagaagggggtcacgtggacttcttcgtgccccttggagca

SEQ ID NO: 7507 - DNA, 121 bp, synthetic construct
  misc_feature 1..121: note = Description of artificial sequence: synthetic polynucleotide sequence
  source 1..121: mol_type = other DNA
ttttgactatgcagaggcaggaattgaagttctttcccagctgtctcaactaactggcacgttctttacggcccccactgggattgcaactggctcttaccagcacagtaagtgttatggg

SEQ ID NO: 7508 - DNA, 184 bp, synthetic construct
  misc_feature 1..184: note = Description of artificial sequence: synthetic polynucleotide sequence
  source 1..184: mol_type = other DNA
gttcttagtgattggctgggatcccaatggggaaaggccccctcttccatctacttctgcgaatcgaagctacagacgtggtccagcttcacagacttcctagaagaaaccttgaaaacagtaaggaagcagctgtatcctttcttcaaggaactgcagaagagcatcagtggcaggatgatag

SEQ ID NO: 7509 - DNA, 121 bp, synthetic construct
  misc_feature 1..121: note = Description of artificial sequence: synthetic polynucleotide sequence
  source 1..121: mol_type = other DNA
tatttacagggcagtttatgtttgacaccatgggtatgaccaacattctaaacaaccaagatactgcgcaagctctggcagatggattgatggagttgtcaaaagaagattctgtaagtgt

SEQ ID NO: 7510 - DNA, 121 bp, synthetic construct
  misc_feature 1..121: note = Description of artificial sequence: synthetic polynucleotide sequence
  source 1..121: mol_type = other DNA
ttccattcaatcttcaggaaagaaatgttgtagaagacaattcttgggacacaaagtccaggctcagcaaaaatgatttaaattttgaagcactgattaatctggtaagctattatataat

SEQ ID NO: 7511 - DNA, 216 bp, synthetic construct
  misc_feature 1..216: note = Description of artificial sequence: synthetic polynucleotide sequence
  source 1..216: mol_type = other DNA
ggagagaatactccagaaggactcagcagaaaagcgagctagagttgtcagagaactcttacagagtgagagaaaatacgtgcagatactggaaattgtgagagatgtttatgtcgcaccactgaaagcagcattgtcatcaaacagagcgattctgagtgctgccaatatccagatcattttctgtgacattctacagattttaagtctcaacag

SEQ ID NO: 7512 - DNA, 149 bp, synthetic construct
  misc_feature 1..149: note = Description of artificial sequence: synthetic polynucleotide sequence
  source 1..149: mol_type = other DNA
ggcagtttctagataacctgagagacagactgcaggaatggggcccagctcactgtgtgggagaaatagtcacgaagtttggaagccagttaaacacatataccaatttcttcaacaattaccctgtcattctgaaaactattgagaag

SEQ ID NO: 7513 - DNA, 121 bp, synthetic construct
  misc_feature 1..121: note = Description of artificial sequence: synthetic polynucleotide sequence
  source 1..121: mol_type = other DNA
gacaatataatcctcaccttttagtgcagagaaatgataccagcattccgaactttcctgaagaggcatgataagaccattgttaccaaaatgctgaggtacgttctgagggagagcacag

SEQ ID NO: 7514 - DNA, 158 bp, synthetic construct
  misc_feature 1..158: note = Description of artificial sequence: synthetic polynucleotide sequence
  source 1..158: mol_type = other DNA
gcctgccagagctgctgctgtacccatcccgaagatttgaagaataccttaatcttctctacgctgtcaggcttcatacccctgcagagcatgttgaccgtggggacttgaccactgcaattgaccaaatcaaaaaatataaaggttatatagatcag

SEQ ID NO: 7515 - DNA, 121 bp, synthetic construct
  misc_feature 1..121: note = Description of artificial sequence: synthetic polynucleotide sequence
  source 1..121: mol_type = other DNA
ttgcctaaaagtactttttttcccctagatgaagcaaaacatcactatgaaggatcatctgtcagatatacagagaatcatctggggatgccctgtatgtattcttaggaacttgctgtat

SEQ ID NO: 7516 - DNA, 121 bp, synthetic construct
  misc_feature 1..121: note = Description of artificial sequence: synthetic polynucleotide sequence
  source 1..121: mol_type = other DNA
gtttttgattttacagactctatcagaagtaaacagatatctgattagggtacaagatgtagcccaacttcattgctgtgatgaagaaataagtttctctttaaggtaaacaatagttaac

SEQ ID NO: 7517 - DNA, 174 bp, synthetic construct
  misc_feature 1..174: note = Description of artificial sequence: synthetic polynucleotide sequence
  source 1..174: mol_type = other DNA
ggctctatgaacacatccatgatctcagccttttcctcttcaatgatgccctgctcgtttctagtcggggcacatctcacactccatttgagaggacttcaaaaacaacctaccagttcattgcatcagtggcccttcatcggttactcatagaaaatattccagattccaagt

SEQ ID NO: 7518 - DNA, 121 bp, synthetic construct
  misc_feature 1..121: note = Description of artificial sequence: synthetic polynucleotide sequence
  source 1..121: mol_type = other DNA
tcaagaatgcatttattcttcagggtccaaaatataaatggatttgtgctacagaaatagaggatgataagttcctatggctgtcagtacttcgaaatgcaatcaaaagcagtatggagaa

SEQ ID NO: 7519 - DNA, 121 bp, synthetic construct
  misc_feature 1..121: note = Description of artificial sequence: synthetic polynucleotide sequence
  source 1..121: mol_type = other DNA
aacacagggaggcctcctggtgaggcggcggaggaggcaaaaaagtgcaggcccccaaataagccccagaaaggcccaagccacgacctcccccgccggcattccatggaccggcagaact

SEQ ID NO: 7520 - DNA, 121 bp, synthetic construct
  misc_feature 1..121: note = Description of artificial sequence: synthetic polynucleotide sequence
  source 1..121: mol_type = other DNA
ttacacaccatacacacacacacataatttaaacaactgcatcagcaaatttgcaatgtcatgttctggaaatatttcctagggtggcaagcttttttggcatttgcttgcaggctgataa

SEQ ID NO: 7521 - DNA, 121 bp, synthetic construct
  misc_feature 1..121: note = Description of artificial sequence: synthetic polynucleotide sequence
  source 1..121: mol_type = other DNA
ggaacacagagatgattctaacaaagtccttttcccagaagtgcccagtcattatgtttgagcagacgttagaattgctgcaggccttggacaccacacgccactttccctgctgaacctc

SEQ ID NO: 7522 - DNA, 121 bp, synthetic construct
  misc_feature 1..121: note = Description of artificial sequence: synthetic polynucleotide sequence
  source 1..121: mol_type = other DNA
ttttttttttttgtcattggcaagcataggccttactgaccgtttataagtcatcttgtaagttatttttcatcattgtcagttctggagaatcatattgaggaagactgtggtttaagga

SEQ ID NO: 7523 - DNA, 121 bp, synthetic construct
  misc_feature 1..121: note = Description of artificial sequence: synthetic polynucleotide sequence
  source 1..121: mol_type = other DNA
cattgtagtgtatcagagtgtctgcatattttttaatgaaacaggtttacttgatctgtgatttacatctaaccatctctccaaatctataatctatatctgtatcagtcatttatacata

SEQ ID NO: 7524 - DNA, 121 bp, synthetic construct
  misc_feature 1..121: note = Description of artificial sequence: synthetic polynucleotide sequence
  source 1..121: mol_type = other DNA
ttaatggttgctggttctactgcaggaatattgtttcttttctgttatcctccttgaccgcatctgaaataaacattgggggaaatgacctaattgggagctgagcagctttcccaattca

SEQ ID NO: 7525 - DNA, 121 bp, synthetic construct
  misc_feature 1..121: note = Description of artificial sequence: synthetic polynucleotide sequence
  source 1..121: mol_type = other DNA
ttcataaattgtacacaggtaaatgtgagataatagtacatgtttctactccaaacatacagaggattttgaatttgaagcacagcttaataacactcctaatggaaatatataaacctct

SEQ ID NO: 7526 - DNA, 121 bp, synthetic construct
  misc_feature 1..121: note = Description of artificial sequence: synthetic polynucleotide sequence
  source 1..121: mol_type = other DNA
aggtgttttgttgtccctcaataacagctgcagagcctctataagtcctttaatcttccctgatgaagtctatgccccagctgggtgtaatcctcatccgaagcatactgaaactcggaag

SEQ ID NO: 7527 - DNA, 121 bp, synthetic construct
  misc_feature 1..121: note = Description of artificial sequence: synthetic polynucleotide sequence
  source 1..121: mol_type = other DNA
cctagtagcaggattgctggatcaaactgtagatatacttttagttctttaaggactctttacagtgttttccatagcatctgtgctagtttgcattcccgtcaatagtgcaaaagcattc

SEQ ID NO: 7528 - DNA, 121 bp, synthetic construct
  misc_feature 1..121: note = Description of artificial sequence: synthetic polynucleotide sequence
  source 1..121: mol_type = other DNA
tagctagtgtttatattaccatcttttctatttgttctctctagaactgaagaactctttttgcatggtaactttgaactgaatcacttgcaggcaatttacaaggtaacctcagtgtctg

SEQ ID NO: 7529 - DNA, 121 bp, synthetic construct
  misc_feature 1..121: note = Description of artificial sequence: synthetic polynucleotide sequence
  source 1..121: mol_type = other DNA
ctatgtagaaactagcaaaaataatgaacatggaagcatgtgatatgcatcttaaatttctcaatgcaatttatagaagttgtattgaagtacatagaaataattttataatgaaaacaaa

SEQ ID NO: 7530 - DNA, 121 bp, synthetic construct
  misc_feature 1..121: note = Description of artificial sequence: synthetic polynucleotide sequence
  source 1..121: mol_type = other DNA
tcttgaattcacttttcggtgctcactttctgatgtttgtagagatgagattgtgtccattaatcctgataaacacttaactatgcttcttaaatctaaacatttctgatttctttttaat

SEQ ID NO: 7531 - DNA, 121 bp, synthetic construct
  misc_feature 1..121: note = Description of artificial sequence: synthetic polynucleotide sequence
  source 1..121: mol_type = other DNA
agcttgcatatatgggtacagcgggtatatagagaatctgtgtaccttctaatcaattactctgtgaccatacagctgctttgaaagtaaagtctgtctttaaaaataagatttaaattgg

SEQ ID NO: 7532 - DNA, 121 bp, synthetic construct
  misc_feature 1..121: note = Description of artificial sequence: synthetic polynucleotide sequence
  source 1..121: mol_type = other DNA
gtcctacgaattgttctacccaagcataccacggccaatgcctgaattcaccaccagtaggcttgaagaaaagtcttcccagccaaactctggctctgcagtgcctgaacatgccttctgg

SEQ ID NO: 7533 - DNA, 121 bp, synthetic construct
  misc_feature 1..121: note = Description of artificial sequence: synthetic polynucleotide sequence
  source 1..121: mol_type = other DNA
ctcctgaatgtcgcaaatttttatcaaagttaatggatcagttagaagctgtaagttaaccactgatcatttattttctggttatggttaaaataccattttattcatttgcgtgtctgtg

SEQ ID NO: 7534 - DNA, 121 bp, synthetic construct
  misc_feature 1..121: note = Description of artificial sequence: synthetic polynucleotide sequence
  source 1..121: mol_type = other DNA
cgggaaagtggtggaggatgatcttgcggccaaaggggacctcggcgcagtaatgtcaacatgtaagtctcacctttcagcttggaattccttcactcttttatctgtgtccaccttctgt

SEQ ID NO: 7535 - DNA, 121 bp, synthetic construct
  misc_feature 1..121: note = Description of artificial sequence: synthetic polynucleotide sequence
  source 1..121: mol_type = other DNA
ttctttgcaggatgtttcgctcagatcgaatgtggagctgccattggaaatggaagcccagtcctctcctgttcttatttgctttatatatcatgtgtgttcctcactcaggtaagactct

SEQ ID NO: 7536 - DNA, 343 bp, synthetic construct
  misc_feature 1..343: note = Description of artificial sequence: synthetic polynucleotide sequence
  source 1..343: mol_type = other DNA
gtgtggggatgtgccaactgccgagtggttttgtccaacccttctgggacctttacttctccatgctaccctaacgactacccaaacagccaggcttgcatgtggacgctccgagcccccaccggttatatcattcagataacatttaacgactttgacattgaagaagctcccaattgcatttatgactcattatcccttgataatggagagagccagactaaattttgtggagcaactgccaaaggcctatcatttaactcaagtgcgaatgagatgcatgtgtccttttcaagtgactttagcatccagaagaaaggtttcaatgccagctacatcagag

SEQ ID NO: 7537 - DNA, 302 bp, synthetic construct
  misc_feature 1..302: note = Description of artificial sequence: synthetic polynucleotide sequence
  source 1..302: mol_type = other DNA
gttgccgtgtccttaaggaatcaaaaggtcattttaccccagacatcagatgcttaccaggtatctgttgcaaaaagcatctctattccagagctcagtgctttcacactctgctttgaagcaaccaaagttggccatgaagacagtgattggacagctttctcctactcaaatgcatccttcacacaattgctcagttttggaaaggccaagagtggctactttctatccatttctgattcaaaatgtttgttgaataatgcattacctgtcaaagaaaaagaagacatttttgcagaaag

SEQ ID NO: 7538 - DNA, 323 bp, synthetic construct
  misc_feature 1..323: note = Description of artificial sequence: synthetic polynucleotide sequence
  source 1..323: mol_type = other DNA
ctttgaacagctctgccttgtttggaataattctttgggctctattggtgtaaatttcaaaagaaactatgaaacagttccatgtgattctaccattagtaaagttattcctgggaatgggaaattgttgttgggctccaatcaaaatgaaattgtctctctaaaaggggacatttataactttcgactttggaattttaccatgaatgccaaaatcctctccaacctcagctgtaatgtgaaagggaatgtagtcgactggcaaaatgacttctggaatatcccaaacctagctctgaaagctgaaagcaacctaagctgtg

SEQ ID NO: 7539 - DNA, 121 bp, synthetic construct
  misc_feature 1..121: note = Description of artificial sequence: synthetic polynucleotide sequence
  source 1..121: mol_type = other DNA
tacatattctttttgtgttgatcaaggttcctacctgatcccgctcccagcagcagaactggccagctgtgcagacctggggaccctctgtcaaggtagggagcccacaccgtgctctgga

SEQ ID NO: 7540 - DNA, 121 bp, synthetic construct
  misc_feature 1..121: note = Description of artificial sequence: synthetic polynucleotide sequence
  source 1..121: mol_type = other DNA
ttctcatctttattaccagctactgtaaactctcctagtactacaccacccactgtcaccactaacatgcctgttactaacagaatcgataaacaaaggaatggtaagaaatcattacctt

SEQ ID NO: 7541 - DNA, 121 bp, synthetic construct
  misc_feature 1..121: note = Description of artificial sequence: synthetic polynucleotide sequence
  source 1..121: mol_type = other DNA
cctatttccaatgggcagatggaattatctatagaatatccgtagtgattcagaacatccttcgtcaccctgaggtaaaagtacagagcaaggtggcagaatgggtaagtgagcttgtaac

SEQ ID NO: 7542 - DNA, 121 bp, synthetic construct
  misc_feature 1..121: note = Description of artificial sequence: synthetic polynucleotide sequence
  source 1..121: mol_type = other DNA
agcaaaactcagccttttccattgtgttttccagctcaattcaaccttccaaaattggaactacacggtttatgtcgttaatatcaggtaagacagaataaattatttgataaattaaaag

SEQ ID NO: 7543 - DNA, 121 bp, synthetic construct
  misc_feature 1..121: note = Description of artificial sequence: synthetic polynucleotide sequence
  source 1..121: mol_type = other DNA
ttaatgaatatatgtatttgtgtttttagttttcacctgagtgctggagaggacaagattaaagtcaagagaagccttgaggatgagccaaggtaacaggacaaagtattgtaaagagtat

SEQ ID NO: 7544 - DNA, 144 bp, synthetic construct
  misc_feature 1..144: note = Description of artificial sequence: synthetic polynucleotide sequence
  source 1..144: mol_type = other DNA
ggttggtgctttgggcccttctagtttacaatgctaccaacaatactaatttggaaggaaaaatcattcagcagaagctcctaaaaaataatgagtccttggatgaaggcttgaggctacatacagtgaatgtgagacaactgg

SEQ ID NO: 7545 - DNA, 121 bp, synthetic construct
  misc_feature 1..121: note = Description of artificial sequence: synthetic polynucleotide sequence
  source 1..121: mol_type = other DNA
tataggtcattgtcttgccatggaggaacccaaaggctactactggccatctatccaaccttctgaatacgttcttccttgtccagacaagcctggcttttctgcttctcggatatggtaa

SEQ ID NO: 7546 - DNA, 121 bp, synthetic construct
  misc_feature 1..121: note = Description of artificial sequence: synthetic polynucleotide sequence
  source 1..121: mol_type = other DNA
tatttaaaatatctattttgtttcatagtttttacaatgctaccaacccattggtaacctactggggacctgttgatatctccaactgtttaagtaagtgagcagttttcctttatttctc

SEQ ID NO: 7547 - DNA, 212 bp, synthetic construct
  misc_feature 1..212: note = Description of artificial sequence: synthetic polynucleotide sequence
  source 1..212: mol_type = other DNA
gaagaagcaaatgaagttgctaaccagattttaaatttaactgctgatgggcagaacttaacctcagccaatattaccaacattgtggaacaggtcaaaagaattgtgaataaagaagaaaacattgatataacacttggctcaactctaatgaatatattttctaatatcttaagcagttcagacagtgacttgcttgagtcatcttctga

SEQ ID NO: 7548 - DNA, 173 bp, synthetic construct
  misc_feature 1..173: note = Description of artificial sequence: synthetic polynucleotide sequence
  source 1..173: mol_type = other DNA
gagctttaaaaacaattgatgaattggccttcaagatagacctaaatagcacatcacatgtgaatattacaactcggaacttggctctcagcgtatcatccctgttaccagggacaaatgcaatttcaaattttagcattggtcttccaagcaataatgaatcgtatttccag

SEQ ID NO: 7549 - DNA, 142 bp, synthetic construct
  misc_feature 1..142: note = Description of artificial sequence: synthetic polynucleotide sequence
  source 1..142: mol_type = other DNA
gatggattttgagagtggacaagtggatccactggcatctgtaattttgcctccaaacttacttgagaatttaagtccagaagattctgtattagttagaagagcacagtttactttcttcaacaaaactggacttttccag

SEQ ID NO: 7550 - DNA, 121 bp, synthetic construct
  misc_feature 1..121: note = Description of artificial sequence: synthetic polynucleotide sequence
  source 1..121: mol_type = other DNA
ggatgtaggaccccaaagaaaaactttagtgagttatgtgatggcgtgcagtattggaaacattactatccagaatctgaaggatcctgttcaaataaaaatcaaacatacaagaactcag

SEQ ID NO: 7551 - DNA, 121 bp, synthetic construct
  misc_feature 1..121: note = Description of artificial sequence: synthetic polynucleotide sequence
  source 1..121: mol_type = other DNA
aaacacaatttcacatgtttattcttatgttaatataggaagtgcatcatcccatctgtgccttctgggatctgaacaaaaacagtaagttttaaaatattggttgtcttaatatagataa

SEQ ID NO: 7552 - DNA, 121 bp, synthetic construct
  misc_feature 1..121: note = Description of artificial sequence: synthetic polynucleotide sequence
  source 1..121: mol_type = other DNA
tcaacagaaagttttggaggatggaacacgtcaggatgtgttgcacacagagattcagatgcaagtgagacagtctgcctgtgtaaccacttcacacactttggagttctgatggtaaggg

SEQ ID NO: 7553 - DNA, 121 bp, synthetic construct
  misc_feature 1..121: note = Description of artificial sequence: synthetic polynucleotide sequence
  source 1..121: mol_type = other DNA
cttccaagaagtgcctcacagttagatgcaagaaacactaaagtcctcactttcatcagctatattgggtgtggaatatctgctattttttcagcagcaactctcctgacatatgttgctt

SEQ ID NO: 7554 - DNA, 270 bp, synthetic construct
  misc_feature 1..270: note = Description of artificial sequence: synthetic polynucleotide sequence
  source 1..270: mol_type = other DNA
ggaaattgcgaagggattatccctccaaaatcttgatgaacctgagcacagccctgctgttcctgaatctcctcttcctcctagatggctggatcacctccttcaatgtggatggactttgcattgctgttgcagtcctgttgcatttcttccttctggcaacctttacctggatggggctagaagcaattcacatgtacattgctctagttaaagtatttaacacttacattcgccgatacattctaaaattctgcatcattggctggg

SEQ ID NO: 7555 - DNA, 121 bp, synthetic construct
  misc_feature 1..121: note = Description of artificial sequence: synthetic polynucleotide sequence
  source 1..121: mol_type = other DNA
tttttgtaacaggtttgcctgccttagtggtgtcagttgttctagcgagcagaaacaacaatgaagtctatggaaaagaaagttatgggaaagaaaaaggtgatgaattgtaagtaataaa

SEQ ID NO: 7556 - DNA, 285 bp, synthetic construct
  misc_feature 1..285: note = Description of artificial sequence: synthetic polynucleotide sequence
  source 1..285: mol_type = other DNA
gctgttggattcaagatccagtcatattttatgtgacctgtgctgggtattttggagtcatgttttttctgaacattgccatgttcattgtggtaatggtgcagatctgtgggaggaatggcaagagaagcaaccggaccctgagagaagaagtgttaaggaacctgcgcagtgtggttagcttgacctttctgttgggcatgacatggggttttgcattctttgcctggggacccttaaatatccccttcatgtacctcttctccatcttcaattcattacaag

SEQ ID NO: 7557 - DNA, 121 bp, synthetic construct
  misc_feature 1..121: note = Description of artificial sequence: synthetic polynucleotide sequence
  source 1..121: mol_type = other DNA
tttgtcacaggcttatttatattcatcttccactgtgctatgaaggagaatgttcagaaacagtggcggcagcatctctgctgtggtagatttcggttagcagataactcaggtaaagagt

SEQ ID NO: 7558 - DNA, 154 bp, synthetic construct
  misc_feature 1..154: note = Description of artificial sequence: synthetic polynucleotide sequence
  source 1..154: mol_type = other DNA
gattggagtaagacagctaccaatatcatcaagaaaagttctgataatctaggaaaatctttgtcttcaagctccattggttccaactcaacctatcttacatccaaatctaaatccagctctaccacctatttcaaaaggaatagccacacag

SEQ ID NO: 7559 - DNA, 121 bp, synthetic construct
  misc_feature 1..121: note = Description of artificial sequence: synthetic polynucleotide sequence
  source 1..121: mol_type = other DNA
ttggaattgatctagatattcatatgtttatggtatagataatgtctcctatgagcattccttcaacaaaagtggatcactcaggtaaactttcgttacttttttgaatgcatgaattttt

SEQ ID NO: 7560 - DNA, 180 bp, synthetic construct
  misc_feature 1..180: note = Description of artificial sequence: synthetic polynucleotide sequence
  source 1..180: mol_type = other DNA
gacagtgcttccatggacaagtccttgtcaaaactggcccatgctgatggagatcaaacatcaatcatccctgtccatcaggtcattgataaggtcaagggttattgcaatgctcattcagacaacttctataaaaatattatcatgtcagacaccttcagccacagcacaaagttttaa

SEQ ID NO: 7561 - DNA, 121 bp, synthetic construct
  misc_feature 1..121: note = Description of artificial sequence: synthetic polynucleotide sequence
  source 1..121: mol_type = other DNA
aggctgtcttccgaagtgctctgtttcatcaacagccgaggagaggagggagtgctaggtggaccagatgactgcaaagcgtgaggacctcgcttctcatgctgcttagaaagcacatagg

SEQ ID NO: 7562 - DNA, 121 bp, synthetic construct
  misc_feature 1..121: note = Description of artificial sequence: synthetic polynucleotide sequence
  source 1..121: mol_type = other DNA
cctctggcgaacatggcgcttgtcccctgccaggtgctgcggatggcaatcctgctgtcttactgctctatcctgtgtaactacaaggccatcgaaatgccctcacaccagacctacggag

SEQ ID NO: 7563 - DNA, 121 bp, synthetic construct
  misc_feature 1..121: note = Description of artificial sequence: synthetic polynucleotide sequence
  source 1..121: mol_type = other DNA
ctgctctcatgggaaccacatccaaaccatagcagaggtcaacagagaccttggcaaaaccatttccagcagatgatgggggcagaagacaaaagggcagtggatcctcttagcccatata

SEQ ID NO: 7564 - DNA, 121 bp, synthetic construct
  misc_feature 1..121: note = Description of artificial sequence: synthetic polynucleotide sequence
  source 1..121: mol_type = other DNA
aattttaattcatttatttttattattgaggaatttttaaactaagcaaggcttttaggtttgttttttctttaataggcctgacagaattgatcactgtcattaaacaagctgtgcagaa

SEQ ID NO: 7565 - DNA, 121 bp, synthetic construct
  misc_feature 1..121: note = Description of artificial sequence: synthetic polynucleotide sequence
  source 1..121: mol_type = other DNA
atgacctgaaggaattcagtccccatgcagtccccgtgtggctggtctgacatcctggctggtgcagctctgcagcccttcttctttcttgcatcttcaacaccccgacacccagggctcc

SEQ ID NO: 7566 - DNA, 121 bp, synthetic construct
  misc_feature 1..121: note = Description of artificial sequence: synthetic polynucleotide sequence
  source 1..121: mol_type = other DNA
tgctactgaacttgatttgttagtattttattgaggatttttgcattaatgttcataagagatgtagttttcttatagcatctttgaagtcagggtatccttcaccttatggaatgaatta

SEQ ID NO: 7567 - DNA, 121 bp, synthetic construct
  misc_feature 1..121: note = Description of artificial sequence: synthetic polynucleotide sequence
  source 1..121: mol_type = other DNA
attatattcaaattttattatgatctaagaaagacatgaactttaagtagaaattaactgaagtcacatttcccttggtgaaaaattattttagatatcatttctgtctgtaagcaagtat

SEQ ID NO: 7568 - DNA, 121 bp, synthetic construct
  misc_feature 1..121: note = Description of artificial sequence: synthetic polynucleotide sequence
  source 1..121: mol_type = other DNA
gcagcggccctggagagactgaggggacaggaggaggggggcgccccattggtgtgtagtcccgcgcagtcgccggctctccttttccggactctggggatctcttgctgcaactgacaag

SEQ ID NO: 7569 - DNA, 121 bp, synthetic construct
  misc_feature 1..121: note = Description of artificial sequence: synthetic polynucleotide sequence
  source 1..121: mol_type = other DNA
ggcagcgtcctgcaggcaggcaaccaactgataacacaaggaactctgtcagacgaagaagaatttgagattcaggaacagatgaccctgctgaatgctagatgggaggctcttagggtgg

SEQ ID NO: 7570 - DNA, 121 bp, synthetic construct
  misc_feature 1..121: note = Description of artificial sequence: synthetic polynucleotide sequence
  source 1..121: mol_type = other DNA
ttaaaacatcctgttgattaatttctcttttgctacatttttcatttcagctcatcctaatgtccaaaaggtggtgctagtatcatctgcgtcagatattcctgttcagtctcatcgtact

SEQ ID NO: 7571 - DNA, 121 bp, synthetic construct
  misc_feature 1..121: note = Description of artificial sequence: synthetic polynucleotide sequence
  source 1..121: mol_type = other DNA
aatgctgtcgaccaggcccgagttttcttggctgatcagccaattgaggcccctgaagagccaagaagaaacctacaatcaaaaacaggtgagactggtttctccactacatcataaaaac

SEQ ID NO: 7572 - DNA, 121 bp, synthetic construct
  misc_feature 1..121: note = Description of artificial sequence: synthetic polynucleotide sequence
  source 1..121: mol_type = other DNA
tttcttttgttttctctttcagcaaatgttcccagcaggccacaggtaagagttaatggcttggttggctctatgttactgatcccaacctagagtaagcagattatccacgactgatttt

SEQ ID NO: 7573 - DNA, 121 bp, synthetic construct
  misc_feature 1..121: note = Description of artificial sequence: synthetic polynucleotide sequence
  source 1..121: mol_type = other DNA
ttgaggtctttaaaatattttttacatttttgggccttactttcataaactagggaacctttaaagccaaatagtaggccaattttttccaagaactttcttgcctccataaagtcaatct

SEQ ID NO: 7574 - DNA, 121 bp, synthetic construct
  misc_feature 1..121: note = Description of artificial sequence: synthetic polynucleotide sequence
  source 1..121: mol_type = other DNA
tccttcccctacttatttctcaagcataagttcctctttttatgtatattgtcttttggtgagcacattttttgaattctgtgtgacctttcctatgtacgaaatggtatatacaagtatt

SEQ ID NO: 7575 - DNA, 121 bp, synthetic construct
  misc_feature 1..121: note = Description of artificial sequence: synthetic polynucleotide sequence
  source 1..121: mol_type = other DNA
cagggtctcacctccttggcaggattacttttttctctctctctctggaaaccttgatcctgccaaaagctcctcttgccttttgagcctcttatcacttcttctgcttggttgcttggaa

SEQ ID NO: 7576 - DNA, 121 bp, synthetic construct
  misc_feature 1..121: note = Description of artificial sequence: synthetic polynucleotide sequence
  source 1..121: mol_type = other DNA
gcttggtggcctgcaatattaaaatagaagtctgttgtgtgcttcatttcattggtgtgcccagtggcctcaatccagtgtcctattgggagacaatacacaccatccaccaagttgtttt

SEQ ID NO: 7577 - DNA, 121 bp, synthetic construct
  misc_feature 1..121: note = Description of artificial sequence: synthetic polynucleotide sequence
  source 1..121: mol_type = other DNA
tttatgagtgatcttatcataagaaaagtacacattacctctcttaattcccttgcatcatcagatatagatactatttgggacaaaaaataaatgttttattaggagtgtaaaattaaga

SEQ ID NO: 7578 - DNA, 121 bp, synthetic construct
  misc_feature 1..121: note = Description of artificial sequence: synthetic polynucleotide sequence
  source 1..121: mol_type = other DNA
agaccactgtgaattctggttcaaatacaaacatgagctatgtgtaccaccattgctaacgcacacacagacagatacatgcaacacctctattccttccaaattttatttggatggggca

SEQ ID NO: 7579 - DNA, 121 bp, synthetic construct
  misc_feature 1..121: note = Description of artificial sequence: synthetic polynucleotide sequence
  source 1..121: mol_type = other DNA
tatatattacatataatttcttataaagaattgacttacgtaattataaaagttaagaagttccatgttccgctatctacgagctggatacccaagaaagctggcagtatagttctgagaa

SEQ ID NO: 7580 - DNA, 121 bp, synthetic construct
  misc_feature 1..121: note = Description of artificial sequence: synthetic polynucleotide sequence
  source 1..121: mol_type = other DNA
cgcctctctgtgcacgtgaagaccaatgagacggcctgcaaccaaacagccgtcatcaagcccctcactaaaagttaccaaggctctggcaagagcctgaccttttcagataccagcacca

SEQ ID NO: 7581 - DNA, 121 bp, synthetic construct
  misc_feature 1..121: note = Description of artificial sequence: synthetic polynucleotide sequence
  source 1..121: mol_type = other DNA
cctgaaagaaatattgcctgagtttaagctgtcagatgaggccagctctgaaagcaaaatagcagtgttagattctaaattaaaagaaccagggaaagaagggaaggagggaaaagaaata

SEQ ID NO: 7582 - DNA, 121 bp, synthetic construct
  misc_feature 1..121: note = Description of artificial sequence: synthetic polynucleotide sequence
  source 1..121: mol_type = other DNA
tcaagtagctgaagcatactgggcttgctgccacttactctaacctgttacagtgatctttggacataaaagttttgtctgtttcattctaaaatcaacaacatgaggtattgcagagcca

SEQ ID NO: 7583 - DNA, 121 bp, synthetic construct
  misc_feature 1..121: note = Description of artificial sequence: synthetic polynucleotide sequence
  source 1..121: mol_type = other DNA
tggaagaacaaataataacctagaaactgaaaagtaagattcaagcatctttcatctaatgtgatctgttttgcgaaccattataagtcaatggcttgagctttttttttttaattttcaa

SEQ ID NO: 7584 - DNA, 121 bp, synthetic construct
  misc_feature 1..121: note = Description of artificial sequence: synthetic polynucleotide sequence
  source 1..121: mol_type = other DNA
gctcttcatttctgtgaaacgtttactcgaaagacggactcgtccccttccccttgtctatgggttggaacaacgctaggaacagtgcttgtcattgcactgaaccttcccccagggggag

SEQ ID NO: 7585 - DNA, 121 bp, synthetic construct
  misc_feature 1..121: note = Description of artificial sequence: synthetic polynucleotide sequence
  source 1..121: mol_type = other DNA
tgccatttgggcgctgggaaggtgctcggcggcggggttcccggtcccaccatgtgcaccaacatagtttacgagtggctcaaagcgctgcagcttccgcagtacgcggagtccttcgtgg

SEQ ID NO: 7586 - DNA, 121 bp, synthetic construct
  misc_feature 1..121: note = Description of artificial sequence: synthetic polynucleotide sequence
  source 1..121: mol_type = other DNA
gaaccgtactattttctagctagttcttcatgcataaaatgggagataattataactactgtacaggatcatgatgaacatgtaataataatggagaaagtgttacacagtgcttggccgt

SEQ ID NO: 7587 - DNA, 121 bp, synthetic construct
  misc_feature 1..121: note = Description of artificial sequence: synthetic polynucleotide sequence
  source 1..121: mol_type = other DNA
gaagtttcctatctatgaacaaatatttcccaaagcaataatctctttattcaactcacgtaatgagaagtcagttcctctgtgccataaagcaatctctttgaagtcttcagtaatgttg

SEQ ID NO: 7588 - DNA, 121 bp, synthetic construct
  misc_feature 1..121: note = Description of artificial sequence: synthetic polynucleotide sequence
  source 1..121: mol_type = other DNA
aaacaaaaaagacaaaaagaggctgggatggaaaagagaagacattctaggaacctctatgttctctaagtgctttgaagccctctggagctccatcacacagggctccaagggcctggcc

SEQ ID NO: 7589 - DNA, 121 bp, synthetic construct
  misc_feature 1..121: note = Description of artificial sequence: synthetic polynucleotide sequence
  source 1..121: mol_type = other DNA
tctgagagccatggaaaatcatttctaggctttgcaatctaatgaagaactttcaacatttgcccagttggatgtcaggatttctaagaatcagtggcttttttgagctttccatttcccc

SEQ ID NO: 7590 - DNA, 121 bp, synthetic construct
  misc_feature 1..121: note = Description of artificial sequence: synthetic polynucleotide sequence
  source 1..121: mol_type = other DNA
ggactggtcaccattcccaactcaaaataagcttaaggacaaccatgttgtcaacagcatcatccccggtgcttagtacatcaacacacccaaatatacagtatgtcaggattatggactt

SEQ ID NO: 7591 - DNA, 121 bp, synthetic construct
  misc_feature 1..121: note = Description of artificial sequence: synthetic polynucleotide sequence
  source 1..121: mol_type = other DNA
gacacagtcagcactcagcagcagtcttttcctcttctgcttccatggcttgctttcttctcgtgtatgtgacacagggtctcactgtgtcacccaggctgcagtgcagtggcatgaacat

SEQ ID NO: 7592 - DNA, 121 bp, synthetic construct
  misc_feature 1..121: note = Description of artificial sequence: synthetic polynucleotide sequence
  source 1..121: mol_type = other DNA
tgcatcactgtaacacggttaatgttactgctgtaatggttagtcagttgaactgggttcgggatacagaagcacttggaatggtcaataggtaagcctcaaagaggtttcacaaaaccac

SEQ ID NO: 7593 - DNA, 121 bp, synthetic construct
  misc_feature 1..121: note = Description of artificial sequence: synthetic polynucleotide sequence
  source 1..121: mol_type = other DNA
gaacccagagactcgaagaggaccaggttcacactcctgaagatggcagattatgtctcatgcaataagccgagatctgacagccagaggatgactaggccacagtctgccatttcctgtt

SEQ ID NO: 7594 - DNA, 121 bp, synthetic construct
  misc_feature 1..121: note = Description of artificial sequence: synthetic polynucleotide sequence
  source 1..121: mol_type = other DNA
gcatagtttgttgattaatgagaagcttacagaaaaataaatgaaacaatatgtcaaagtagaggaaataggtattaataattccaagggaagcagaaatttaccaggaattttgactctt

SEQ ID NO: 7595 - DNA, 358 bp, synthetic construct
  misc_feature 1..358: note = Description of artificial sequence: synthetic polynucleotide sequence
  source 1..358: mol_type = other DNA
catggccgcgcgggcagcagcggcggcggcggcggcggcggcgcgggcgcgggcgcgggcaggcagcggcgaacggcgggcgccccccgggccgcggccggcgcccggagcccgggacctggaggcgggggcgcgcggcgcggcggcggcggcggcggcaccgggacccatgctggggggcggcggcgacggcggcggcggcctgaacagtgtgcaccaccaccccctgctcccccgtcacgaactcaacatggcccataacgcgggcgccgcggccgccgccggcacccacagcgccaagagcggcggctccgaggcggctctcaaggagggtggaagcgccgccgcgctgtcctcc

SEQ ID NO: 7596 - DNA, 478 bp, synthetic construct
  misc_feature 1..478: note = Description of artificial sequence: synthetic polynucleotide sequence
  source 1..478: mol_type = other DNA
tcctcctcctcctccgcggcggcagcggcggcatcctcttcctcctcgtcgggcccgggctcggccatggagacggggctgctccccaaccacaaactgaaaaccgttggcgaagcccccgccgcgccgccccaccagcagcaccaccaccaccaccatgcccaccaccaccaccaccatgcccaccacctccaccaccaccacgcactacagcagcagctaaaccagttccagcagcagcagcagcagcagcaacagcagcagcagcagcagcagcaacagcaacatcccatttccaacaacaacagcttgggcggcgcgggcggcggcgcgcctcagcccggccccgacatggagcagccgcaacatggaggcgccaaggacagtgctgcgggcggccaggccgaccccccgggcccgccgctgctgagcaagccgggcgacgaggacgacgcgccgcccaagatgggggagccgg

SEQ ID NO: 7597 - DNA, 477 bp, synthetic construct
  misc_feature 1..477: note = Description of artificial sequence: synthetic polynucleotide sequence
  source 1..477: mol_type = other DNA
cgggcggccgctacgagcacccgggcttgggcgccctgggcacgcagcagccgccggtcgccgtgcccgggggcggcggcggcccggcggccgtcccggagtttaataattactatggcagcgctgcccctgcgagcggcggccccggcggccgcgctgggccttgctttgatcaacatggcggacaacaaagccccgggatggggatgatgcactccgcctccgccgccgccgccggggcccccggcagcatggaccccctgcagaactcccacgaagggtaccccaacagccagtgcaaccattatccgggctacagccggcccggcgcgggcggcggcggcggcggcggcggcggaggaggaggaggcagcggaggaggaggaggaggaggaggagcaggagcaggaggagcaggagcgggagctgtggcggcggcggccgcggcggcggcggcagcagcaggaggcggcggcg

SEQ ID NO: 7598 - DNA, 479 bp, synthetic construct
  misc_feature 1..479: note = Description of artificial sequence: synthetic polynucleotide sequence
  source 1..479: mol_type = other DNA
gcggcggctatgggggctcgtccgcggggtacggggtgctgagctccccccggcagcagggcggcggcatgatgatgggccccgggggcggcggggccgcgagcctcagcaaggcggccgccggctcggcggcggggggcttccagcgcttcgccggccagaaccagcacccgtcgggggccaccccgaccctcaatcagctgctcacctcgcccagccccatgatgcggagctacggcggcagctaccccgagtacagcagccccagcgcgccgccgccgccgccgtcgcagccccagtcccaggcggcggcggcgggggcggcggcgggcggccagcaggcggccgcgggcatgggcttgggcaaggacatgggcgcccagtacgccgctgccagcccggcctgggcggccgcgcaacaaaggagtcacccggcgatgagccccggcacccccggaccgaccatgggcagatcccag

SEQ ID NO: 7599 - DNA, 196 bp, synthetic construct
  misc_feature 1..196: note = Description of artificial sequence: synthetic polynucleotide sequence
  source 1..196: mol_type = other DNA
gggcagcccaatggatccaatggtgatgaagagacctcagttgtatggcatgggcagtaaccctcattctcagcctcagcagagcagtccgtacccaggaggttcctatggccctccaggcccacagcggtatccaattggcatccagggtcggactcccggggccatggccggaatgcagtaccctcagcagcag

SEQ ID NO: 7600 - DNA, 121 bp, synthetic construct
  misc_feature 1..121: note = Description of artificial sequence: synthetic polynucleotide sequence
  source 1..121: mol_type = other DNA
caacactgttgctcctaattactgttttatcctacttttaggactctggagatgccacatggaaagaaacattctggttggcaagtatcttcttacatgctcttacttgctccaagtcttt

SEQ ID NO: 7601 - DNA, 151 bp, synthetic construct
  misc_feature 1..151: note = Description of artificial sequence: synthetic polynucleotide sequence
  source 1..151: mol_type = other DNA
gatgccacctcagtatggacagcaaggtgtgagtggttactgccagcagggccaacagccatattacagccagcagccgcagcccccgcacctcccaccccaggcgcagtatctgccgtcccagtcccagcagaggtaccagccgcagcag

SEQ ID NO: 7602 - DNA, 121 bp, synthetic construct
  misc_feature 1..121: note = Description of artificial sequence: synthetic polynucleotide sequence
  source 1..121: mol_type = other DNA
tttaggacatgtctcaggaaggctatggaactagatctcaacctcctctggcccccggaaaacctaaccatgaagacttgaacttaatacagcaagaaagaccatcaagtttaccagtaag

SEQ ID NO: 7603 - DNA, 121 bp, synthetic construct
  misc_feature 1..121: note = Description of artificial sequence: synthetic polynucleotide sequence
  source 1..121: mol_type = other DNA
attaaatgctgaagagtcttgtcgggatattacttttcatcctgtctctgccatggagactttgggatcactgggtggtctcttggtcacttgcaggtgttttaggtaggatgttgcaatc

SEQ ID NO: 7604 - DNA, 121 bp, synthetic construct
  misc_feature 1..121: note = Description of artificial sequence: synthetic polynucleotide sequence
  source 1..121: mol_type = other DNA
ggatctgtctggctccattgatgacctccccacgggaacggaagcaactttgagctcagcagtcagtgcatccgggtccacgagcagccaaggggatcagagcaacccggcgcagtcgcct

SEQ ID NO: 7605 - DNA, 121 bp, synthetic construct
  misc_feature 1..121: note = Description of artificial sequence: synthetic polynucleotide sequence
  source 1..121: mol_type = other DNA
tccccacatgcgtcccctcatctctccagcatcccggggggcccatctccctctcctgttggctctcctgtaggaagcaaccagtctcgatctggcccaatctctcctgcaagtatcccag

SEQ ID NO: 7606 - DNA, 121 bp, synthetic construct
  misc_feature 1..121: note = Description of artificial sequence: synthetic polynucleotide sequence
  source 1..121: mol_type = other DNA
ctcctgtgttttacaggtagtcagatgcctccgcagccacccgggagccagtcagaatccagttcccatcccgccttgagccagtcaccaatgccacaggaaagaggttcgtctccagttc

SEQ ID NO: 7607 - DNA, 181 bp, synthetic construct
  misc_feature 1..181: note = Description of artificial sequence: synthetic polynucleotide sequence
  source 1..181: mol_type = other DNA
ggttttatggcaggcacacaaagaaaccctcagatggctcagtatggacctcaacagacaggaccatccatgtcgcctcatccttctcctgggggccagatgcatgctggaatcagtagctttcagcagagtaactcaagtgggacttacggtccacagatgagccagtatggaccacaag

SEQ ID NO: 7608 - DNA, 329 bp, synthetic construct
  misc_feature 1..329: note = Description of artificial sequence: synthetic polynucleotide sequence
  source 1..329: mol_type = other DNA
ggtaactactccagacccccagcgtatagtggggtgcccagtgcaagctacagcggcccagggcccggtatgggtatcagtgccaacaaccagatgcatggacaagggccaagccagccatgtggtgctgtgcccctgggacgaatgccatcagctgggatgcagaacagaccatttcctggaaatatgagcagcatgacccccagttctcctggcatgtctcagcagggagggccaggaatggggccgccaatgccaactgtgaaccgtaaggcacaggaggcagccgcagcagtgatgcaggctgctgcgaactcagcacaaagcag

SEQ ID NO: 7609 - DNA, 147 bp, synthetic construct
  misc_feature 1..147: note = Description of artificial sequence: synthetic polynucleotide sequence
  source 1..147: mol_type = other DNA
ggcaaggcagtttccccggcatgaaccagagtggacttatggcttccagctctccctacagccagcccatgaacaacagctctagcctgatgaacacgcaggcgccgccctacagcatggcgcccgccatggtgaacagctcggcag

SEQ ID NO: 7610 - DNA, 121 bp, synthetic construct
  misc_feature 1..121: note = Description of artificial sequence: synthetic polynucleotide sequence
  source 1..121: mol_type = other DNA
gattagcatctgtgggtcttgcagatatgatgtctcctggtgaatccaaactgcccctgcctctcaaagcagacggcaaagaagaaggcactccacagcccgagagcaagtcaaaggtact

SEQ ID NO: 7611 - DNA, 160 bp, synthetic construct
  misc_feature 1..160: note = Description of artificial sequence: synthetic polynucleotide sequence
  source 1..160: mol_type = other DNA
ggatagctacagctctcagggtatttctcagcccccaaccccaggcaacctgccagtcccttccccaatgtcccccagctctgctagcatctcctcatttcatggagatgaaagtgatagcattagcagcccaggctggccaaagactccatcaagccct

SEQ ID NO: 7612 - DNA, 211 bp, synthetic construct
  misc_feature 1..211: note = Description of artificial sequence: synthetic polynucleotide sequence
  source 1..211: mol_type = other DNA
gaagtccagctcctccaccactactggggagaagatcacgaaggtgtacgagctggggaatgagccagagagaaagctctgggtcgaccgatacctcaccttcatggaagagagaggctctcctgtctcaagtctgcctgccgtgggcaagaagcccctggacctgttccgactctacgtctgcgtcaaagagatcgggggtttggcccag

SEQ ID NO: 7613 - DNA, 206 bp, synthetic construct
  misc_feature 1..206: note = Description of artificial sequence: synthetic polynucleotide sequence
  source 1..206: mol_type = other DNA
ggttaataaaaacaagaagtggcgtgagctggcaaccaacctaaacgttggcacctcaagcagtgcagcgagctccctgaaaaagcagtatattcagtacctgtttgcctttgagtgcaagatcgaacgtggggaggagcccccgccggaagtcttcagcaccggggacaccaaaaagcagcccaagctccagccgccatctcctg

SEQ ID NO: 7614 - DNA, 140 bp, synthetic construct
  misc_feature 1..140: note = Description of artificial sequence: synthetic polynucleotide sequence
  source 1..140: mol_type = other DNA
gctaactcgggatccttgcaaggcccacagaccccccagtcaactggcagcaattccatggcagaggttccaggtgacctgaagccacctaccccagcctccacccctcacggccagatgactccaatgcaaggtggaag

SEQ ID NO: 7615 - DNA, 174 bp, synthetic construct
  misc_feature 1..174: note = Description of artificial sequence: synthetic polynucleotide sequence
  source 1..174: mol_type = other DNA
gaagcagtacaatcagtgtgcacgacccattctcagatgtgagtgattcatccttcccgaaacggaactccatgactccaaacgccccctaccagcagggcatgagcatgcccgatgtgatgggcaggatgccctatgagcccaacaaggacccctttgggggaatgagaaaag

SEQ ID NO: 7616 - DNA, 152 bp, synthetic construct
  misc_feature 1..152: note = Description of artificial sequence: synthetic polynucleotide sequence
  source 1..152: mol_type = other DNA
gtgcctggaagcagcgagccctttatgacgcaaggacagatgcccaacagcagcatgcaggacatgtacaaccaaagtccctccggagcaatgtctaacctgggcatggggcagcgccagcagtttccctatggagccagttacgaccgaag

SEQ ID NO: 7617 - DNA, 121 bp, synthetic construct
  misc_feature 1..121: note = Description of artificial sequence: synthetic polynucleotide sequence
  source 1..121: mol_type = other DNA
gcctcattccaggcatgaaccttatgggcagcagtatccaggccaaggccctccctcgggacagccgccgtatggagggcaccagcccggcctgtacccacagcagccggtgagttggcaa

SEQ ID NO: 7618 - DNA, 332 bp, synthetic construct
  misc_feature 1..332: note = Description of artificial sequence: synthetic polynucleotide sequence
  source 1..332: mol_type = other DNA
gaattacaaacgccatatggacggcatgtacgggcccccagccaagcgccacgagggcgacatgtacaacatgcagtacagcagccagcagcaggagatgtacaaccagtatggaggctcctactcgggcccggaccgcaggcccatccagggccagtacccgtatccctacagcagggagaggatgcagggcccggggcagatccagacacacggaatcccgcctcagatgatgggcggcccgctgcagtcgtcctccagtgaggggcctcagcagaatatgtgggcagcacgcaatgatatgccttatccctaccagaacaggcagggcc

SEQ ID NO: 7619 - DNA, 453 bp, synthetic construct
  misc_feature 1..453: note = Description of artificial sequence: synthetic polynucleotide sequence
  source 1..453: mol_type = other DNA
ctggcggccctacacaggcgcccccttacccaggcatgaaccgcacagacgatatgatggtacccgatcagaggataaatcatgagagccagtggccttctcacgtcagccagcgtcagccttatatgtcgtcctcagcctccatgcagcccatcacacgcccaccacagccgtcctaccagacgccaccgtcactgccaaatcacatctccagggcgcccagcccagcgtccttccagcgctccctggagaaccgcatgtctccaagcaagtctccttttctgccgtctatgaagatgcagaaggtcatgcccacggtccccacatcccaggtcaccgggccaccaccccaaccacccccaatcagaagggagatcacctttcctcctggctcagtagaagcatcacaaccagtcttgaaacaaaggcgaaagattacctccaaagatatcg

SEQ ID NO: 7620 - DNA, 121 bp, synthetic construct
  misc_feature 1..121: note = Description of artificial sequence: synthetic polynucleotide sequence
  source 1..121: mol_type = other DNA
cctgaggcgtggcgtgtgatgatgtcccttaaatcaggtcttttggctgagagtacgtgggctttggacactattaatattcttctgtatgatgacagcactgttgctactttcaatctct

SEQ ID NO: 7621 - DNA, 343 bp, synthetic construct
  misc_feature 1..343: note = Description of artificial sequence: synthetic polynucleotide sequence
  source 1..343: mol_type = other DNA
gttgtctggatttctcgaacttttagtcgagtactttagaaaatgcctgattgacatttttggaattcttatggaatatgaagtgggagaccccagccaaaaagcacttgatcacaacgcagcaaggaaggatgacagccagtccttggcagacgattctgggaaagaggaggaagatgctgaatgtattgatgacgacgaggaagacgaggaggatgaggaggaagacagcgagaagacagaaagcgatgaaaagagcagcatcgctctgactgccccggacgccgctgcagacccaaaggagaagcccaagcaagccagtaagttcgacaagctgccaata

SEQ ID NO: 7622 - DNA, 458 bp, synthetic construct
  misc_feature 1..458: note = Description of artificial sequence: synthetic polynucleotide sequence
  source 1..458: mol_type = other DNA
aagatagtcaaaaagaacaacctgtttgttgttgaccgatctgacaagttggggcgtgtgcaggagttcaatagtggccttctgcactggcagctcggcgggggtgacaccaccgagcacattcagactcactttgagagcaagatggaaattcctcctcgcaggcgcccacctccccccttaagctccgcaggtagaaagaaagagcaagaaggcaaaggcgactctgaagagcagcaagagaaaagcatcatagcaaccatcgatgacgtcctctctgctcggccaggggcattgcctgaagacgcaaaccctgggccccagaccgaaagcagtaagtttccctttggtatccagcaagccaaaagtcaccggaacatcaagctgctggaggacgagcccaggagccgagacgagactcctctgtgtaccatcgcgcactggcaggactcgctggc

SEQ ID NO: 7623 - DNA, 459 bp, synthetic construct
  misc_feature 1..459: note = Description of artificial sequence: synthetic polynucleotide sequence
  source 1..459: mol_type = other DNA
taagcgatgcatctgtgtgtccaatattgtccgtagcttgtcattcgtgcctggcaatgatgccgaaatgtccaaacatccaggcctggtgctgatcctggggaagctgattcttcttcaccacgagcatccagagagaaagcgagcaccgcagacctatgagaaagaggaggatgaggacaagggggtggcctgcagcaaagatgagtggtggtgggactgcctcgaggtcttgagggataacacgttggtcacgttggccaacatttccgggcagctagacttgtctgcttacacggaaagcatctgcttgccaattttggatggcttgctgcactggatggtgtgcccgtctgcagaggcacaagatccctttccaactgtgggacccaactcggtcctgtcgcctcagagacttgtgctggagaccctctgtaaactcagtatccaggacaataa

SEQ ID NO: 7624 - DNA, 466 bp, synthetic construct
  misc_feature 1..466: note = Description of artificial sequence: synthetic polynucleotide sequence
  source 1..466: mol_type = other DNA
tgtggacctgatcttggccactcctccatttagtcgtcaggagaaattctatgctacattagttaggtacgttggggatcgcaaaaacccagtctgtcgagaaatgtccatggcgcttttatcgaaccttgcccaaggggacgcactagcagcaagggccatagctgtgcagaaaggaagcattggaaacttgataagcttcctagaggatggggtcacgatggcccagtaccagcagagccagcacaacctcatgcacatgcagcccccgcccctggaaccacctagcgtagacatgatgtgcagggcggccaaggctttgctagccatggccagagtggacgaaaaccgctcggaattccttttgcacgagggccggttgctggatatctcgatatcagctgtcctgaactctctggttgcatctgtcatctgtgatgtactgtttcagattgggcagttatga

SEQ ID NO: 7625 - DNA, 121 bp, synthetic construct
  misc_feature 1..121: note = Description of artificial sequence: synthetic polynucleotide sequence
  source 1..121: mol_type = other DNA
tgacgcggacctggtggagctcaagcgggagctggaagccgtcggggagttccgccaccgttctccgagcaggtctctgtcggtccccaaccggcctcggccacctcaacccccgcagaga

SEQ ID NO: 7626 - DNA, 121 bp, synthetic construct
  misc_feature 1..121: note = Description of artificial sequence: synthetic polynucleotide sequence
  source 1..121: mol_type = other DNA
ctccaagtaagactctgcttgctttcagctccctggatgcctgccaggaataaccgcgcgttccctgctactgaaaacacggctccgaatccacttctccccggccttccggtccccacag

SEQ ID NO: 7627 - DNA, 121 bp, synthetic construct
  misc_feature 1..121: note = Description of artificial sequence: synthetic polynucleotide sequence
  source 1..121: mol_type = other DNA
cccatattatactctcaaagcagcggtacgaaatagagaacaactcatttcccctttaacctagcattagttggtaggttggctggaggagttaagtctgtggcccaagggcctaccagaa

SEQ ID NO: 7628 - DNA, 121 bp, synthetic construct
  misc_feature 1..121: note = Description of artificial sequence: synthetic polynucleotide sequence
  source 1..121: mol_type = other DNA
agtagaaaacccaaacatggttttgtggggtgtgtgcctttgaccccggacttaagcaacaagcgtggtcttgggcgtagctacgaggtggttggtgggctccagggcctgcgtgcccctc

SEQ ID NO: 7629 - DNA, 121 bp, synthetic construct
  misc_feature 1..121: note = Description of artificial sequence: synthetic polynucleotide sequence
  source 1..121: mol_type = other DNA
aatctctgggtcacatgcataaggaaccacattcattgacccttaaccaatgaacgccagtggcagatccctcattctgattaggtctcctttcttccccatgtgcctcctctaagggtca

SEQ ID NO: 7630 - DNA, 121 bp, synthetic construct
  misc_feature 1..121: note = Description of artificial sequence: synthetic polynucleotide sequence
  source 1..121: mol_type = other DNA
tttcccaactgctttgggggctggccatgtagcctcacaagtaacttttctctgtcggaatacgagtacgatgttgtgtgctacttccagatttgacctttaaagagactgggaatgtcct

SEQ ID NO: 7631 - DNA, 121 bp, synthetic construct
  misc_feature 1..121: note = Description of artificial sequence: synthetic polynucleotide sequence
  source 1..121: mol_type = other DNA
ctggtcttcaaggtttaggtggtagacatatacccttggctaatgggtgggagactcatcatgctacaatggtgctgctgagttcaactatgtccttactgattatttacatgctgaaact

SEQ ID NO: 7632 - DNA, 121 bp, synthetic construct
  misc_feature 1..121: note = Description of artificial sequence: synthetic polynucleotide sequence
  source 1..121: mol_type = other DNA
taaattggttttgttagatatcaccccatttttctttctgagtatcatcacatgtcagtaaatagttggaatttattcttccagaaccttaaatcaaattccttcagaggatctagaccct

SEQ ID NO: 7633 - DNA, 121 bp, synthetic construct
  misc_feature 1..121: note = Description of artificial sequence: synthetic polynucleotide sequence
  source 1..121: mol_type = other DNA
tgaggcaactctgtgccctggtaaatctttcatattattcaaatctagagcagctgttcctcctctaggtacccacagcatcctgggctttcctttgtcatagcatttgtcacacctcttc

SEQ ID NO: 7634 - DNA, 121 bp, synthetic construct
  misc_feature 1..121: note = Description of artificial sequence: synthetic polynucleotide sequence
  source 1..121: mol_type = other DNA
cattttttcagcaccctgcttcactttagaggtgaagttgtgggctcaatgttacccacatcacttgcccattaaaaaagccaccatcgtcataataccataattttctgcatgaaatttt

SEQ ID NO: 7635 - DNA, 121 bp, synthetic construct
  misc_feature 1..121: note = Description of artificial sequence: synthetic polynucleotide sequence
  source 1..121: mol_type = other DNA
ttttttttctcagtttaattttgttgggagaatccttggacctagaggacttacagccaaacaacttgaagcagaaaccggatgtaaaatcatggtccgaggcaaaggctcaatgagggat

SEQ ID NO: 7636 - DNA, 121 bp, synthetic construct
  misc_feature 1..121: note = Description of artificial sequence: synthetic polynucleotide sequence
  source 1..121: mol_type = other DNA
aggtaagtccttgaaaatggactaagtctttatgtgagtaacttactatacttttacatcgtaataataaaatttccagatttttttgtgcttaaaacactatattccaggccgggcgcgg

SEQ ID NO: 7637 - DNA, 121 bp, synthetic construct
  misc_feature 1..121: note = Description of artificial sequence: synthetic polynucleotide sequence
  source 1..121: mol_type = other DNA
taagaggaacaggtgcaggagttgaagctgattatgggctcaaaagaggttcatgcatttatctattgatttctttaatgagagcatatttgtttgctaaaaatgatccagtagagagtga

SEQ ID NO: 7638 - DNA, 121 bp, synthetic construct
  misc_feature 1..121: note = Description of artificial sequence: synthetic polynucleotide sequence
  source 1..121: mol_type = other DNA
cacagagcaaaaatacaaagtgaatgaaatcatgagattgctgggagatgcagatgattgtaagtcgttgaagttccggtaagagaaaaagaaacacatgtaggatagattaagaattata

SEQ ID NO: 7639 - DNA, 121 bp, synthetic construct
  misc_feature 1..121: note = Description of artificial sequence: synthetic polynucleotide sequence
  source 1..121: mol_type = other DNA
ttacgccaatcagaccttttccacctttttaaaatagaatgaaaaagagaggaagctataaacaactgatgatccgcctgctgaaatcacaaggaaaatatgaagagggccacctctctcc

SEQ ID NO: 7640 - DNA, 121 bp, synthetic construct
  misc_feature 1..121: note = Description of artificial sequence: synthetic polynucleotide sequence
  source 1..121: mol_type = other DNA
ttagggttgtttctcgggcagtgttgttttggcaatagataattcatacaccctactactagcactgcccaagactggattatctgtgacagggacttatatcagacttgtgacctatgac

SEQ ID NO: 7641 - DNA, 121 bp, synthetic construct
  misc_feature 1..121: note = Description of artificial sequence: synthetic polynucleotide sequence
  source 1..121: mol_type = other DNA
tgtatgttttgcagttgagggttgctgcggcgtaggagaacaggccgcgcatttgagggaaaaagaagaatttggctccagactggcttctcaaacaagccgtgtaattaccctgagcctg

SEQ ID NO: 7642 - DNA, 121 bp, synthetic construct
  misc_feature 1..121: note = Description of artificial sequence: synthetic polynucleotide sequence
  source 1..121: mol_type = other DNA
ttatcacttgcacatctacctgggcttggttctgccattggttgagggtctggaaatgacgcctctgggtctccttcttgtatgggtaggggtatatcagatgccctgccactgtgctcat

SEQ ID NO: 7643 - DNA, 121 bp, synthetic construct
  misc_feature 1..121: note = Description of artificial sequence: synthetic polynucleotide sequence
  source 1..121: mol_type = other DNA
caatctcaggatcagccaagttgcataactccacagctgccattcacatttcattcttggattaggtgggttcactgtgctagataccacaggtcaaaaaagattgtctgggcaatggtct

SEQ ID NO: 7644 - DNA, 121 bp, synthetic construct
  misc_feature 1..121: note = Description of artificial sequence: synthetic polynucleotide sequence
  source 1..121: mol_type = other DNA
gaaatgaaaggacctagaacagccaaaacaatcctgggaaagaacaaagttggaaaacgtacttcccaattgtaaaactcagcccttatagaggatggacacatagacggacagaacagac

SEQ ID NO: 7645 - DNA, 206 bp, synthetic construct
  misc_feature 1..206: note = Description of artificial sequence: synthetic polynucleotide sequence
  source 1..206: mol_type = other DNA
ctcacagctggtcctcgtccacccagatggtcttgcgctgctcctcgccgatcttgtccttgacaacgcggagcagctcctctacgctgccccacatgtcaggttccaccgtggcgtacaggcacggcagggcctccagctccttctccttcagccggcacacgcgcaggaactcctcctccgtctcaggtcggggcagcagcttt

SEQ ID NO: 7646 - DNA, 121 bp, synthetic construct
  misc_feature 1..121: note = Description of artificial sequence: synthetic polynucleotide sequence
  source 1..121: mol_type = other DNA
tacctgaacctcttgatgttcttctcacacacccggatgaagagcacgatggggtagatgttggacttgatcaagtctcttgtgcagccgatcccagcctccagcaggcagtgcttgttct

SEQ ID NO: 7647 - DNA, 121 bp, synthetic construct
  misc_feature 1..121: note = Description of artificial sequence: synthetic polynucleotide sequence
  source 1..121: mol_type = other DNA
tggcggccacagcttcaatgttggcaggggcgatgcattcgaacgcgttggggttcttctctcgggagtagatgatggtctccgtcttctgccttctgaggaactcatctcttgtgacgat

SEQ ID NO: 7648 - DNA, 181 bp, synthetic construct
  misc_feature 1..181: note = Description of artificial sequence: synthetic polynucleotide sequence
  source 1..181: mol_type = other DNA
cctgacttgcagatggtgaactccatggcacctcccgagttgagcagcctctgcaccagcgtcttggccagcacggtgggtgtgaagagcacgggccggcggcgctcgcagtagaaggcgcgtaccaggctgtaggggatgaggctgaggttcttgcccagctcgctctcagggtccagct

SEQ ID NO: 7649 - DNA, 137 bp, synthetic construct
  misc_feature 1..137: note = Description of artificial sequence: synthetic polynucleotide sequence
  source 1..137: mol_type = other DNA
ccttcctgcttctcagtcaagagcttggtggcgtccagcgaggaccgggccaggctccctagcggactccccgagatgatgcggacccgctcgttgctgttcatccgcttatacttgttctcggacctgctgacgaa

SEQ ID NO: 7650 - DNA, 121 bp, synthetic construct
  misc_feature 1..121: note = Description of artificial sequence: synthetic polynucleotide sequence
  source 1..121: mol_type = other DNA
cggagagccttacctgaaggagctggccaaaaaggaagcttgctcgcgagagacgggggctgacccgggggtcgcttgttgaaagcgcttcttctggctgcagggtgttctgaaatgaatt

SEQ ID NO: 7651 - DNA, 121 bp, synthetic construct
  misc_feature 1..121: note = Description of artificial sequence: synthetic polynucleotide sequence
  source 1..121: mol_type = other DNA
tggcagacctacccggagtgcccgcagggtgtggtgggtgccgtctacctcctcccggctgcctcggtgcatcaggcgctgcagtttcaccaggaggagctgctgggctctggggagcgaa

SEQ ID NO: 7652 - DNA, 121 bp, synthetic construct
  misc_feature 1..121: note = Description of artificial sequence: synthetic polynucleotide sequence
  source 1..121: mol_type = other DNA
ccggctgtagctgggtatggtgcccatatccaggtcatggtctgtgaaagggtcgacccgcgcgcacagccactcgtgcctgtcctggtacatggtgtcacggacgtgcacaacatcgtca

SEQ ID NO: 7653 - DNA, 121 bp, synthetic construct
  misc_feature 1..121: note = Description of artificial sequence: synthetic polynucleotide sequence
  source 1..121: mol_type = other DNA
cacttcagggacatggtgcaggcgtccagctggctggagatgttcaggttcagccggatgtagaacgagtcccccgatgtgatcaggccgtcctccatgtccttcaccagcttccggtacc

SEQ ID NO: 7654 - DNA, 121 bp, synthetic construct
  misc_feature 1..121: note = Description of artificial sequence: synthetic polynucleotide sequence
  source 1..121: mol_type = other DNA
cgtggttgaccttgtagtgcagcgtgacggggccgctgcacctctggatggtccagtgggcttcctctttggtgcatgtgtccaacgggacactctgcctctcgcctcggatgcagccttc

SEQ ID NO: 7655 - DNA, 203 bp, synthetic construct
  misc_feature 1..203: note = Description of artificial sequence: synthetic polynucleotide sequence
  source 1..203: mol_type = other DNA
ccagcagcagctggtggccctcacggaggccggctttctcggccagagagccaggcttgaccgagtgcacgaagctccctcgcgcgttgccccccagcagggtgagctgggaggtgaggctgtcgccattcagcgtcgtgtgctgcaccgagggccctgggccccgcacgtgccccacagaggtgaccgaaggccggaagggt

SEQ ID NO: 7656 - DNA, 134 bp, synthetic construct
  misc_feature 1..134: note = Description of artificial sequence: synthetic polynucleotide sequence
  source 1..134: mol_type = other DNA
cctttccagagagaacttcctgaacatgaggttgacctgctccaggtcgtaggcatccaggccctcggattggtgggaggaggaggaggagtggatggaggagggtccgaaggagtagcgttcgtgactgtcat

SEQ ID NO: 7657 - DNA, 121 bp, synthetic construct
  misc_feature 1..121: note = Description of artificial sequence: synthetic polynucleotide sequence
  source 1..121: mol_type = other DNA
acccaggaccctcccggatctgagaggcacgtaccatccagatctaaggcgtcaaacccgccgctgtcattgtcttcttcgactgtgctgcaagacacaagggaggtgggggaaagcatgc

SEQ ID NO: 7658 - DNA, 121 bp, synthetic construct
  misc_feature 1..121: note = Description of artificial sequence: synthetic polynucleotide sequence
  source 1..121: mol_type = other DNA
tgccacccacctgcgatggggcgcgtcctccttgtagcgtctgacgatggagtcgtttcccgggggctcggcggtgattgacatgatgctgctgcggctccgggggggctgcttcagacac

SEQ ID NO: 7659 - DNA, 121 bp, synthetic construct
  misc_feature 1..121: note = Description of artificial sequence: synthetic polynucleotide sequence
  source 1..121: mol_type = other DNA
ggcagaggctgcagctcaccatcttggtgaaggagttggtgatgggcagagatccgcaggagctagggctggcgtccgtgccttcttcctcgtgccccttggctgtcctcacgggagacga

SEQ ID NO: 7660 - DNA, 121 bp, synthetic construct
  misc_feature 1..121: note = Description of artificial sequence: synthetic polynucleotide sequence
  source 1..121: mol_type = other DNA
agacaggccaagagagatttgggcgtctcactaaccttgaaaatctgatgttcgcttcaggctgatgggggatttggctctctgcagctaaaagggaggggaggggaagaaacaagacaca

SEQ ID NO: 7661 - DNA, 178 bp, synthetic construct
  misc_feature 1..178: note = Description of artificial sequence: synthetic polynucleotide sequence
  source 1..178: mol_type = other DNA
cctggatgcccttcaggttcatcctgcgctggggcggatggtagggcaggaagtacttgctgtcttcaggtgactcctccgaggtggaagaatcgtcagcttcttgaccattggtcctggggctggcatccccaaagtcctgagagatgatggttactggcaggttcctgggcagact

SEQ ID NO: 7662 - DNA, 199 bp, synthetic construct
  misc_feature 1..199: note = Description of artificial sequence: synthetic polynucleotide sequence
  source 1..199: mol_type = other DNA
cctggtccaggttgttgctgtccttggagaggcgccgcagcttgctctccaggttgacgatgcaggcctcccgccgcaccatctcgatcctcatctcgtcgttcttctcctccagctcgcggatctgcttcctgtacttgtccttttcgattaagcactgcgagtactgtgtctgagcttcatctcgggagtggaaggc

SEQ ID NO: 7663 - DNA, 121 bp, synthetic construct
  misc_feature 1..121: note = Description of artificial sequence: synthetic polynucleotide sequence
  source 1..121: mol_type = other DNA
ggtcccgctcccgctccacctcctccagctgcagcatgaccgtgttcatgcggtgcttgtacatttcacagtcctttcccagggtcgagcacttgagctccaggtcctccttctcctccag

SEQ ID NO: 7664 - DNA, 154 bp, synthetic construct
  misc_feature 1..154: note = Description of artificial sequence: synthetic polynucleotide sequence
  source 1..154: mol_type = other DNA
ccttgtctcgcagctcctctgcctggcgggcctcctcctgcaggttgtagatcctgttgaccagctcctgcctgtcctccagggcctccttgcggtcgtgttccaagatgtccaggatggccttgtctgagtctggcaggctgcgcttcccggc

SEQ ID NO: 7665 - DNA, 181 bp, synthetic construct
  misc_feature 1..181: note = Description of artificial sequence: synthetic polynucleotide sequence
  source 1..181: mol_type = other DNA
cctggatgatggactgcagctcctggtttttggtcttcagcatttcattctcccgctccagttccagaacctgctccttcttgggccgattttcaatgtcattcttcagttttagagactgatttctctccagcttacattcctcctccatcttattcaaccggtgctttagctgatcgat

SEQ ID NO: 7666 - DNA, 327 bp, synthetic construct
  misc_feature 1..327: note = Description of artificial sequence: synthetic polynucleotide sequence
  source 1..327: mol_type = other DNA
cctcgagttggaggtctcggctcctcatgaccgccatgttcttctcctcactgagctgtgcgtagcgcatggctaagttgtagttgtcgtccttcaccttgaccagctcgtcattgtagctgtcccgctcttccttcatcttgtagtaccgctcctggaaggttagcagctccacgcgcgtcagcgtcatctgcttcttctcatcctccagctgccgcaacctggccagcagctcgcagcgttgcaggtccttggccttcatctgctgctgcagcttgatgacctcgttcatcaggaagtgcgtgaggccctcgtggccttcctcca

SEQ ID NO: 7667 - DNA, 139 bp, synthetic construct
  misc_feature 1..139: note = Description of artificial sequence: synthetic polynucleotide sequence
  source 1..139: mol_type = other DNA
cccacaatggtggagaatctccgagtgggctctttcccagtcaccagtttgtacagttctgggtaataaaattctaggctctccaagaagaccacatagcccctttgccccttggtatgtagaatgtccaacagccggc

SEQ ID NO: 7668 - DNA, 214 bp, synthetic construct
  misc_feature 1..214: note = Description of artificial sequence: synthetic polynucleotide sequence
  source 1..214: mol_type = other DNA
cctgctcggttgatcttggatggcagcataggggcattaagcacttcatcttcatcctgctcatcaatgaccttacactgacgcaggtagggcgtgagcttggcagggttgatatagcggctgagcatgtgccggttacactccacattctcccacaaggcgtcctcttcatccttcagcgtctccatgtagtcatccatctctggccctcctc

SEQ ID NO: 7669 - DNA, 121 bp, synthetic construct
  misc_feature 1..121: note = Description of artificial sequence: synthetic polynucleotide sequence
  source 1..121: mol_type = other DNA
accctgtctctccataatatatagagaggtatagaggggataacagatgccgagtacctggcatggaggggtgctcacacacaggggctgctatcccgccattggggtgtgacttctacac

SEQ ID NO: 7670 - DNA, 121 bp, synthetic construct
  misc_feature 1..121: note = Description of artificial sequence: synthetic polynucleotide sequence
  source 1..121: mol_type = other DNA
tgtccttctagaattcaataccacagacttattatttcatttgtctttctcttccatcagtgggatcagagtgtcagctccatggacacaggcgtttgtatgacttttgttcgcttttgta

SEQ ID NO: 7671 - DNA, 121 bp, synthetic construct
  misc_feature 1..121: note = Description of artificial sequence: synthetic polynucleotide sequence
  source 1..121: mol_type = other DNA
actgacataaatgttggatcttttgcttttgtattacaggctctgaggttcagtcatttttctcccagtctgttttctctctgttgttgctggtcaattccattgctctatcttcaagttc

SEQ ID NO: 7672 - DNA, 121 bp, synthetic construct
  misc_feature 1..121: note = Description of artificial sequence: synthetic polynucleotide sequence
  source 1..121: mol_type = other DNA
aaaggtaaaatagataaatacacaattatagtcaggaacttcaacactaactacactctcaacaattgacagaaccaagagatagaaaatcagcaagattatggcagaactgaacaataca

SEQ ID NO: 7673 - DNA, 145 bp, synthetic construct
  misc_feature 1..145: note = Description of artificial sequence: synthetic polynucleotide sequence
  source 1..145: mol_type = other DNA
cctagaagcatttgcggtggacgatggaggggccggactcgtcatactcctgcttgctgatccacatctgctggaaggtggacagcgaggccaggatggagccgccgatccacacggagtacttgcgctcaggaggagcaatgat

SEQ ID NO: 7674 - DNA, 183 bp, synthetic construct
  misc_feature 1..183: note = Description of artificial sequence: synthetic polynucleotide sequence
  source 1..183: mol_type = other DNA
ccttgatcttcattgtgctgggtgccagggcagtgatctccttctgcatcctgtcggcaatgccagggtacatggtggtgccgccagacagcactgtgttggcgtacaggtctttgcggatgtccacgtcacacttcatgatggagttgaaggtagtttcgtggatgccacaggactccatgc

SEQ ID NO: 7675 - DNA, 440 bp, synthetic construct
  misc_feature 1..440: note = Description of artificial sequence: synthetic polynucleotide sequence
  source 1..440: mol_type = other DNA
cccaggaaggaaggctggaagagtgcctcagggcagcggaaccgctcattgccaatggtgatgacctggccgtcaggcagctcgtagctcttctccagggaggagctggaagcagccgtggccatctcttgctcgaagtccagggcgacgtagcacagcttctccttaatgtcacgcacgatttcccgctcggccgtggtggtgaagctgtagccgcgctcggtgaggatcttcatgaggtagtcagtcaggtcccggccagccaggtccagacgcaggatggcatgggggagggcatacccctcgtagatgggcacagtgtgggtgaccccgtcaccggagtccatcacgatgccagtggtacggccagaggcgtacagggatagcacagcctggatagcaacgtacatggctggggtgttgaaggtctcaaacatgat

SEQ ID NO: 7676 - DNA, 241 bp, synthetic construct
  misc_feature 1..241: note = Description of artificial sequence: synthetic polynucleotide sequence
  source 1..241: mol_type = other DNA
cctgggtcatcttctcgcggttggccttggggttcaggggggcctcggtcagcagcacggggtgctcctcgggagccacacgcagctcattgtagaaggtgtggtgccagattttctccatgtcgtcccagttggtgacgatgccgtgctcgatggggtacttcagggtgaggatgcctctcttgctctgggcctcgtcgcccacataggaatccttctgacccatgcccaccatcacgcc

SEQ ID NO: 7677 - DNA, 121 bp, synthetic construct
  misc_feature 1..121: note = Description of artificial sequence: synthetic polynucleotide sequence
  source 1..121: mol_type = other DNA
tggtgcctggggcgccccacgatggaggggaagacggcccggggggcatcgtcgcccgcgaagccggccttgcacatgccggagccgttgtcgacgacgagcgcggcgatatcatcatcca

SEQ ID NO: 7678 - DNA, 121 bp, synthetic construct
  misc_feature 1..121: note = Description of artificial sequence: synthetic polynucleotide sequence
  source 1..121: mol_type = other DNA
gcagatggtctctgcgatgagttccttctcgttaagtgctggatatacttggcttgcactggacaccttttacggagggattccggcaactgaccagttcttaaacctgttagaacttctg

SEQ ID NO: 7679 - DNA, 121 bp, synthetic construct
  misc_feature 1..121: note = Description of artificial sequence: synthetic polynucleotide sequence
  source 1..121: mol_type = other DNA
tcattgcaacaaacattattttgttacctggtatgttgctagcatgtgagacaagagattgcatctgctcgctccaagaagatccactttttgacaaacatccatcttcaatttgtcaaag

SEQ ID NO: 7680 - DNA, 121 bp, synthetic construct
  misc_feature 1..121: note = Description of artificial sequence: synthetic polynucleotide sequence
  source 1..121: mol_type = other DNA
tgcaaggcgcacttgtgtttgtacctatgaaaataaagaggaatttctgaatcaccctaacccttaagtaggtaaaatttgcaggtgaaatgagaccaacagcaggccttttctctttcac

SEQ ID NO: 7681 - DNA, 121 bp, synthetic construct
  misc_feature 1..121: note = Description of artificial sequence: synthetic polynucleotide sequence
  source 1..121: mol_type = other DNA
gtacccctggggttctgatagagttgtagctggcactgtaggggtccctctatcagagcgacaatctttccctcctcatttatgcctctcctatctccttctcatttgctcagttttccct

SEQ ID NO: 7682 - DNA, 121 bp, synthetic construct
  misc_feature 1..121: note = Description of artificial sequence: synthetic polynucleotide sequence
  source 1..121: mol_type = other DNA
acatggcttcattaactttatatattctacctgttatgggggggttcacattaagaaaatttgcatatgcaggaaatgaatgtcatttgcagagagctaatgtcattaaaatttaggcagt

SEQ ID NO: 7683 - DNA, 121 bp, synthetic construct
  misc_feature 1..121: note = Description of artificial sequence: synthetic polynucleotide sequence
  source 1..121: mol_type = other DNA
caataaataagtggcactgatcatctcatctttaagtccatgttgtcaattcagaccacacttagggaatcagactctccagggaaatatcagttaataaaataactagagagaaaccagg

SEQ ID NO: 7684 - DNA, 121 bp, synthetic construct
  misc_feature 1..121: note = Description of artificial sequence: synthetic polynucleotide sequence
  source 1..121: mol_type = other DNA
agaagtcacctaatctttactgaaaacatttacctctggaaaaggtcgacattttgatacaggacaaacactgtcactaaccttggcactagactttaaatattttccaccaaatatcaat

SEQ ID NO: 7685 - DNA, 121 bp, synthetic construct
  misc_feature 1..121: note = Description of artificial sequence: synthetic polynucleotide sequence
  source 1..121: mol_type = other DNA
acctaaacaactgcttctgttttcagcattcttgaattttgcagtattttcagcatccttctgaaggctaacaaccaccaggcaattagtttttgatctttttgcttgaattgccattgtt

SEQ ID NO: 7686 - DNA, 121 bp, synthetic construct
  misc_feature 1..121: note = Description of artificial sequence: synthetic polynucleotide sequence
  source 1..121: mol_type = other DNA
taatacaagagcttttcagacttggcctcagagacataagaggtggggaagataattcataggtcttaattgtgcataattatgcatattctcagttgcaaagatgatcactgttatactc

SEQ ID NO: 7687 - DNA, 121 bp, synthetic construct
  misc_feature 1..121: note = Description of artificial sequence: synthetic polynucleotide sequence
  source 1..121: mol_type = other DNA
acaccaggaagagagtgaagaatacagaattgggcagagagagaaggtgaagagcgatagagttgaaacaggacttagctgatctgcagggggagctctggagttggtatggcccttcaga

SEQ ID NO: 7688 - DNA, 121 bp, synthetic construct
  misc_feature 1..121: note = Description of artificial sequence: synthetic polynucleotide sequence
  source 1..121: mol_type = other DNA
ttcatgccactcagttcaggagatggctgcttgaagtaggtagtattaaagcccaatgttgagagatggatggaaaagtgaaaggtagaaggaaaggaaaaaagggcagttaattaagagt

SEQ ID NO: 7689 - DNA, 121 bp, synthetic construct
  misc_feature 1..121: note = Description of artificial sequence: synthetic polynucleotide sequence
  source 1..121: mol_type = other DNA
tcttaaactaacttgctctctggcattgccactccacttcttgctgattttcatctcctggttctcctcacctcagttagcaaggccagtgttgtgtgtgctgtccatagctcctttcctc

SEQ ID NO: 7690 - DNA, 121 bp, synthetic construct
  misc_feature 1..121: note = Description of artificial sequence: synthetic polynucleotide sequence
  source 1..121: mol_type = other DNA
ggagtgttgagtggtaaagtcttttcagcatgctttctgaaagttttctctttactctcattttcacctgggtaaaaagaatgtaggaatgattaacagggtggttaatgtgtagcagctg

SEQ ID NO: 7691 - DNA, 121 bp, synthetic construct
  misc_feature 1..121: note = Description of artificial sequence: synthetic polynucleotide sequence
  source 1..121: mol_type = other DNA
gatgactgaaataaactccaggaaggaatccccagtgccacttaagaaccaactgagttcgaaaagatacttaatctctttgagcctgaacataataagacagtggatcttgcaagggtgt

SEQ ID NO: 7692 - DNA, 121 bp, synthetic construct
  misc_feature 1..121: note = Description of artificial sequence: synthetic polynucleotide sequence
  source 1..121: mol_type = other DNA
tgtctgtctgtctgtctgtctctctctctcgtcctttctttcagctaacctacaactaccacacctaaaacaagagttagacagtcacacaataatagggacttcaacatccaactgacaa

SEQ ID NO: 7693 - DNA, 121 bp, synthetic construct
  misc_feature 1..121: note = Description of artificial sequence: synthetic polynucleotide sequence
  source 1..121: mol_type = other DNA
gcagggccaagggggccgacttgccacgtgaggttttgtctttcccaccttgttaggctgcttctttgcctttctgcctggcaattcctgaaggtggtgttctgttttatctcttttttgt

SEQ ID NO: 7694 - DNA, 121 bp, synthetic construct
  misc_feature 1..121: note = Description of artificial sequence: synthetic polynucleotide sequence
  source 1..121: mol_type = other DNA
gatgtatgaaaggaacagttcctaccaggttttccttacgtctgttacatgttgggagattatcttggtttggcttctaccagaaacagatcctgatacacaaggagtcatgtacaagtaa

SEQ ID NO: 7695 - DNA, 121 bp, synthetic construct
  misc_feature 1..121: note = Description of artificial sequence: synthetic polynucleotide sequence
  source 1..121: mol_type = other DNA
ctcagccacgtaaaacttcctagaatatgttagagtatgtgaccatttaagtaccatcagaatgttacaaaagttatcctgcaaaaaacagatcagtatctttaaagttaactgtttacta

SEQ ID NO: 7696 - DNA, 121 bp, synthetic construct
  misc_feature 1..121: note = Description of artificial sequence: synthetic polynucleotide sequence
  source 1..121: mol_type = other DNA
agagattaggactttaaatattaaattctagggagacacatgtaaactcataacaaagaacttccctaggtaccctacttaagatcccacccagttagggagcctggcactccctaatgcc

SEQ ID NO: 7697 - DNA, 121 bp, synthetic construct
  misc_feature 1..121: note = Description of artificial sequence: synthetic polynucleotide sequence
  source 1..121: mol_type = other DNA
agcccaccgggaacgaaagagaagctctatctcccctccaggagcccagctatgaactccttctccacaagtaagtgcaggaaatccttagccctggaactgccagcggcggtcgagccct

SEQ ID NO: 7698 - DNA, 192 bp, synthetic construct
  misc_feature 1..192: note = Description of artificial sequence: synthetic polynucleotide sequence
  source 1..192: mol_type = other DNA
ggcgccttcggtccagttgccttctccctggggctgctcctggtgttgcctgctgccttccctgccccagtacccccaggagaagattccaaagatgtagccgccccacacagacagccactcacctcttcagaacgaattgacaaacaaattcggtacatcctcgacggcatctcagccctgagaaaggag

SEQ ID NO: 7699 - DNA, 121 bp, synthetic construct
  misc_feature 1..121: note = Description of artificial sequence: synthetic polynucleotide sequence
  source 1..121: mol_type = other DNA
ccagacatgtaacaagagtaacatgtgtgaaagcagcaaagaggcactggcagaaaacaacctgaaccttccaaagatggctgaaaaagatggatgcttccaatctggattcaatgaggta

SEQ ID NO: 7700 - DNA, 148 bp, synthetic construct
  misc_feature 1..148: note = Description of artificial sequence: synthetic polynucleotide sequence
  source 1..148: mol_type = other DNA
ggagacttgcctggtgaaaatcatcactggtcttttggagtttgaggtatacctagagtacctccagaacagatttgagagtagtgaggaacaagccagagctgtgcagatgagtacaaaagtcctgatccagttcctgcagaaaaag

SEQ ID NO: 7701 - DNA, 169 bp, synthetic construct
  misc_feature 1..169: note = Description of artificial sequence: synthetic polynucleotide sequence
  source 1..169: mol_type = other DNA
ggcaaagaatctagatgcaataaccacccctgacccaaccacaaatgccagcctgctgacgaagctgcaggcacagaaccagtggctgcaggacatgacaactcatctcattctgcgcagctttaaggagttcctgcagtccagcctgagggctcttcggcaaatgtag

SEQ ID NO: 7702 - DNA, 121 bp, synthetic construct
  misc_feature 1..121: note = Description of artificial sequence: synthetic polynucleotide sequence
  source 1..121: mol_type = other DNA
cagtgttgggatgtattttacagattaccacgggttcctttcaggctaagaagctgtccgtctccatttcaaatcaaggagtggggagagaagatagattattcactattgggacaactgg

SEQ ID NO: 7703 - DNA, 121 bp, synthetic construct
  misc_feature 1..121: note = Description of artificial sequence: synthetic polynucleotide sequence
  source 1..121: mol_type = other DNA
tattaggtagctggtataccatattaggttggtatttagcacaacgtgttgacggccaattctaattggtcaaatttatatgacctgctgaaggcagatatgaagagcaatgccctttcca

SEQ ID NO: 7704 - DNA, 121 bp, synthetic construct
  misc_feature 1..121: note = Description of artificial sequence: synthetic polynucleotide sequence
  source 1..121: mol_type = other DNA
gttggtttcctctaaaagctctcttccggacttgcagatggctgcacatggtggccccttgatctgtggacatgtctggttctctctgtgtgtgtccaaattttctcttctcataagaaca

SEQ ID NO: 7705 - DNA, 121 bp, synthetic construct
  misc_feature 1..121: note = Description of artificial sequence: synthetic polynucleotide sequence
  source 1..121: mol_type = other DNA
agcagggtaaagactgggaatagctgcacttcactatgtcccatgattttccttggtgaacaaccaaaattagtgatgtccactctgttgtccttgaccacagacagatctacttgtgatt

SEQ ID NO: 7706 - DNA, 121 bp, synthetic construct
  misc_feature 1..121: note = Description of artificial sequence: synthetic polynucleotide sequence
  source 1..121: mol_type = other DNA
catggacatctttagtgccattattctgcctaccccaaggtgccaaggatgacagtaccgaaacagctgaagtgctttctttgctaacagcctgccaaccaatacctaagctccacctagt

SEQ ID NO: 7707 - DNA, 121 bp, synthetic construct
  misc_feature 1..121: note = Description of artificial sequence: synthetic polynucleotide sequence
  source 1..121: mol_type = other DNA
gtggccctggaagctcacttggggtgacctacacaatgaattgtttggaatgacactgatctggcagacggggcttccccaaaacttagctttccttgggtctgttggcttctttccccga

SEQ ID NO: 7708 - DNA, 121 bp, synthetic construct
  misc_feature 1..121: note = Description of artificial sequence: synthetic polynucleotide sequence
  source 1..121: mol_type = other DNA
atgggaggctgctcactcacgcaccacgtacccagcttagaaacattaatgcatacccagtaagtgcctgtcaccttggcagcactgggggcagaaaggaataagacagtcctcatcatgg

SEQ ID NO: 7709 - DNA, 121 bp, synthetic construct
  misc_feature 1..121: note = Description of artificial sequence: synthetic polynucleotide sequence
  source 1..121: mol_type = other DNA
ccagggatggtgcctaacatgattgctgttaatcagaacacgattctgctcatgtctaccctccgcaaatttaataacacttccatcttaactaagcacttatcctgtcctgtggccataa

SEQ ID NO: 7710 - DNA, 121 bp, synthetic construct
  misc_feature 1..121: note = Description of artificial sequence: synthetic polynucleotide sequence
  source 1..121: mol_type = other DNA
cagaggggccaaggctgggagggcaaatatgttttatgtcatgagctaacacctttcaattggttgtggccagctggaaagttgggttgattctgcaggtcagttcttgacaggaaaggga

SEQ ID NO: 7711 - DNA, 121 bp, synthetic construct
  misc_feature 1..121: note = Description of artificial sequence: synthetic polynucleotide sequence
  source 1..121: mol_type = other DNA
caggattatgcagactgccttgccccttctcttttggccaagtagaaagtacttatcccgtttttctctctaaagtctgctttgtcaggcttctagcattcacttttgttctaatcacatt

SEQ ID NO: 7712 - DNA, 121 bp, synthetic construct
  misc_feature 1..121: note = Description of artificial sequence: synthetic polynucleotide sequence
  source 1..121: mol_type = other DNA
tgaaggactggaggttggtatagctggaggctgcctgggcctctctctctctccctaaaaacacagcttcttcaaatggctagcttggacttcctcaagcatgctggcctcagggtagttg

SEQ ID NO: 7713 - DNA, 121 bp, synthetic construct
  misc_feature 1..121: note = Description of artificial sequence: synthetic polynucleotide sequence
  source 1..121: mol_type = other DNA
tcatctccaccaccccctgcagccgctctctccaatgccaccagcctttgcttacctggcattctgtaaattctgaacaactggctacctgccctcttgcagcactctccccctatggctg

SEQ ID NO: 7714 - DNA, 121 bp, synthetic construct
  misc_feature 1..121: note = Description of artificial sequence: synthetic polynucleotide sequence
  source 1..121: mol_type = other DNA
tccaggtttaaatgtccttggagcccactgcctcttactagatgctgcttattgaagtgtttgggattccagactcttgaccgagaaacaaatacattattcaggacataataggttaaca

SEQ ID NO: 7715 - DNA, 121 bp, synthetic construct
  misc_feature 1..121: note = Description of artificial sequence: synthetic polynucleotide sequence
  source 1..121: mol_type = other DNA
ttacctgctaggcttagtatcatctgcaggatagaaatagtatctcacgcatctccatatttggcatgaagctgatggaaacaaattgaatttcaattcccttgaattcttcttgctgatt

SEQ ID NO: 7716 - DNA, 121 bp, synthetic construct
  misc_feature 1..121: note = Description of artificial sequence: synthetic polynucleotide sequence
  source 1..121: mol_type = other DNA
gcaaacttgataagactacaggtatcccttgcagcagaaaagcaattattaaacttcacgaatacactgattattaaagaacacaggccgggcgtggtggctcacgcctgtaagcccagca

SEQ ID NO: 7717 - DNA, 121 bp, synthetic construct
  misc_feature 1..121: note = Description of artificial sequence: synthetic polynucleotide sequence
  source 1..121: mol_type = other DNA
tttgtagtagaaaatgcctatttatctttaaaactctaacctacgttagtaaagctatccattcttcacgctgtacatcttgataaaccatacttccaatagcaatgatttgctttcatgt

SEQ ID NO: 7718 - DNA, 121 bp, synthetic construct
  misc_feature 1..121: note = Description of artificial sequence: synthetic polynucleotide sequence
  source 1..121: mol_type = other DNA
caatgcttaatgtaaagcaacaactattaagacagtgtgatattagcataaagatagacgtagaccagggccaggtgcggtggctcatgcctctaatccctgcactttgggaggccgaggc

SEQ ID NO: 7719 - DNA, 121 bp, synthetic construct
  misc_feature 1..121: note = Description of artificial sequence: synthetic polynucleotide sequence
  source 1..121: mol_type = other DNA
attgtatgcaaatcctaaggaggtatctgagagtttcatttctaataaggaagaccagtgtgtagcacactaacccttccagcaagaacagtaagaaaaactggataagttttcaaaaatc

SEQ ID NO: 7720 - DNA, 121 bp, synthetic construct
  misc_feature 1..121: note = Description of artificial sequence: synthetic polynucleotide sequence
  source 1..121: mol_type = other DNA
ggcagtgcctccagcgtctggtccctacatcctatccacaaaatcagtgcagagggaacatgcattacagcagcagacctagaagccaagagaaagaaggaatgttttagttcttctgaag

SEQ ID NO: 7721 - DNA, 121 bp, synthetic construct
  misc_feature 1..121: note = Description of artificial sequence: synthetic polynucleotide sequence
  source 1..121: mol_type = other DNA
cacaattaatgaagatttttgtatcacgttttaaggttcaccagaaagcaactaccactagagagccagtaagcaactaagcagacaaaattagttgataccatccagtctctgtcattga

SEQ ID NO: 7722 - DNA, 121 bp, synthetic construct
  misc_feature 1..121: note = Description of artificial sequence: synthetic polynucleotide sequence
  source 1..121: mol_type = other DNA
gcaggggatgcacaggcagctccactgagagtctagcagagccctgcacaaacctcagcgatactccatctgtccttgatgaggactagaaaatggttcactcaccctccatttgcctcaa

SEQ ID NO: 7723 - DNA, 121 bp, synthetic construct
  misc_feature 1..121: note = Description of artificial sequence: synthetic polynucleotide sequence
  source 1..121: mol_type = other DNA
tacaaaaataaataaataaataaaaagcttctcctcttcctcttcaaagccactctacatacaaaatgaatctcttttgctcaaaatcacagacacacggagctggaacctcaacccgggc

SEQ ID NO: 7724 - DNA, 121 bp, synthetic construct
  misc_feature 1..121: note = Description of artificial sequence: synthetic polynucleotide sequence
  source 1..121: mol_type = other DNA
acaactgacccgccagctgtgctatgtccccacccccccatggactccttgtcataaacctgtaatctaagcccattgtgttccaggaggaaaccaggggagaaaggaagctaacatgtgg

SEQ ID NO: 7725 - DNA, 121 bp, synthetic construct
  misc_feature 1..121: note = Description of artificial sequence: synthetic polynucleotide sequence
  source 1..121: mol_type = other DNA
acagaatgactttcaattaagtagttaatagtgatgatgatacaaatccctgacatttcgtcaaactgcattagtcagggtacactagtttatgcttgataacaaagaagccccaatatcc

SEQ ID NO: 7726 - DNA, 121 bp, synthetic construct
  misc_feature 1..121: note = Description of artificial sequence: synthetic polynucleotide sequence
  source 1..121: mol_type = other DNA
tcttccagcagctgggtttttgactctgagattcttctaatcttggaaatgctatcattcttgaccctctatcagccttaaagaaagacctcagcaggcaattgtggctacagaaggcata

SEQ ID NO: 7727 - DNA, 121 bp, synthetic construct
  misc_feature 1..121: note = Description of artificial sequence: synthetic polynucleotide sequence
  source 1..121: mol_type = other DNA
cgaaatgaagagaactgaattcagggagttggttactcaggttatgaaaatgctaagaagactaagaaacacagtgaagcatgccagaaatgggcaatatcaggaagccatcgttttcaac

SEQ ID NO: 7728 - DNA, 121 bp, synthetic construct
  misc_feature 1..121: note = Description of artificial sequence: synthetic polynucleotide sequence
  source 1..121: mol_type = other DNA
gtgaggattatgacaacatgctgcagtcctgctgcacagatcggtggaaaagggagtcttgtgctctgggagtagatccacgaatgtgggctggaccaggcacatcagtgtcccctacttc

SEQ ID NO: 7729 - DNA, 121 bp, synthetic construct
  misc_feature 1..121: note = Description of artificial sequence: synthetic polynucleotide sequence
  source 1..121: mol_type = other DNA
aactggaggctttcagtagaagaattcagatacggtgtctaattagtgcaagttcctatctgcttctccgtgaatctgcttccttatggacgagtaaagaactggcccagttagaagcttc

SEQ ID NO: 7730 - DNA, 121 bp, synthetic construct
  misc_feature 1..121: note = Description of artificial sequence: synthetic polynucleotide sequence
  source 1..121: mol_type = other DNA
gaggcaagggcgtgggaaggctcaacctggccagcggcagagtaccaggaagtctgcacgaactcactgctgctcacctgaggaacacggggtggggagaaggtgaggagttccgcggcag

SEQ ID NO: 7731 - DNA, 121 bp, synthetic construct
  misc_feature 1..121: note = Description of artificial sequence: synthetic polynucleotide sequence
  source 1..121: mol_type = other DNA
aggaaactttccccaatagcagaaacagtgacggatttctgggtcatttttggaagcatttgctccactttggtttctttggtctcataatctcattgtgccaattatgtacatcatcctc

SEQ ID NO: 7732 - DNA, 121 bp, synthetic construct
  misc_feature 1..121: note = Description of artificial sequence: synthetic polynucleotide sequence
  source 1..121: mol_type = other DNA
tacactgagcatatttaaaaatgactgaggacttaaacgtttgtgatacaaatccagtgctatatcatctcagcactatttctggaaaaacaagttgctgaactaaaagtgggaattcacc

SEQ ID NO: 7733 - DNA, 121 bp, synthetic construct
  misc_feature 1..121: note = Description of artificial sequence: synthetic polynucleotide sequence
  source 1..121: mol_type = other DNA
tctccctcagcaccaagattacaccaagcaaattacttcacttgcctgttcaacaatcttctcagagggcaagtttagcctacaaaacttatattaaataggaaaaaagagttgaggttat

SEQ ID NO: 7734 - DNA, 121 bp, synthetic construct
  misc_feature 1..121: note = Description of artificial sequence: synthetic polynucleotide sequence
  source 1..121: mol_type = other DNA
gcctattaaactctctgctccttaaagccacacacacacacacaaactgcatttaagatgctatgtgcttttgttctcagaggaaacacatttactagagagagagtggcacaggatagga

SEQ ID NO: 7735 - DNA, 121 bp, synthetic construct
  misc_feature 1..121: note = Description of artificial sequence: synthetic polynucleotide sequence
  source 1..121: mol_type = other DNA
ctccaggtgaaatgagaaggtgaagagaagagattctaaatgtggacagatgggagggatacagaaagaaagcatgaagtaggattaaggattaagttcagagggatttttcattgttgtt

SEQ ID NO: 7736 - DNA, 121 bp, synthetic construct
  misc_feature 1..121: note = Description of artificial sequence: synthetic polynucleotide sequence
  source 1..121: mol_type = other DNA
ggttctgcactgtcaggttacccagatccagttacagaaaagaagccaaaacaacttgcggaaaataagtctacagaaaagataaataatagtactctaatgaatgaacagacttgtgaca

SEQ ID NO: 7737 - DNA, 121 bp, synthetic construct
  misc_feature 1..121: note = Description of artificial sequence: synthetic polynucleotide sequence
  source 1..121: mol_type = other DNA
agcccgagatggcaccagagcttcttgatccctaacccgatactgggagaagagaaaacgctgcaaaactggtgcaaactggaataggtgaccgttagttgccttccaattattaacatat

SEQ ID NO: 7738 - DNA, 121 bp, synthetic construct
  misc_feature 1..121: note = Description of artificial sequence: synthetic polynucleotide sequence
  source 1..121: mol_type = other DNA
ttaattcattgccgttgtttagtacatcatcagctgcaggtcttccagagtgtcttcaaaaatcagtttctatctgaacctggcatttgagcccagtcatccctagacaatatggtaaact

SEQ ID NO: 7739 - DNA, 121 bp, synthetic construct
  misc_feature 1..121: note = Description of artificial sequence: synthetic polynucleotide sequence
  source 1..121: mol_type = other DNA
ggtagtaattcccaaactctagcatgcatcacgatcactgggggtctccctaaaatgcacattctgcctgagcaggtccagggtggagcatgagattctgcatttcttttttcacctaggc

SEQ ID NO: 7740 - DNA, 121 bp, synthetic construct
  misc_feature 1..121: note = Description of artificial sequence: synthetic polynucleotide sequence
  source 1..121: mol_type = other DNA
ttaaacagatgacaaatgcagactgcgtttaagccatagtcactggggcacatatatggtgtatgggaatgtggtacaggactctgttttagctttttcatttctttgagacagcgtctta

SEQ ID NO: 7741 - DNA, 121 bp, synthetic construct
  misc_feature 1..121: note = Description of artificial sequence: synthetic polynucleotide sequence
  source 1..121: mol_type = other DNA
aaaaaaaaattatgatgcaaattgcaaacggcattcgaaacaggactaagtgaaagactatgcttacatttccattcttgttcaatgtgtttttcttggagtaactcctttgttgttttat

SEQ ID NO: 7742 - DNA, 121 bp, synthetic construct
  misc_feature 1..121: note = Description of artificial sequence: synthetic polynucleotide sequence
  source 1..121: mol_type = other DNA
ccagcaaggcccataaaggaatgaagacataggatagattcatggtagtaaactgttccagtttagcacagagtgcgaggcagaaggctaatttaagtaacattgcaatgaggtaccaggc

SEQ ID NO: 7743 - DNA, 121 bp, synthetic construct
  misc_feature 1..121: note = Description of artificial sequence: synthetic polynucleotide sequence
  source 1..121: mol_type = other DNA
taatattgtgtgatccatgtcgagggtcaaagccagacttacaccgcccagccattttcacaatcagcaggacaagaaggatagtatcaaatatccagactggaatgaatatgaggaacca

SEQ ID NO: 7744 - DNA, 121 bp, synthetic construct
  misc_feature 1..121: note = Description of artificial sequence: synthetic polynucleotide sequence
  source 1..121: mol_type = other DNA
gttttttccttgccaagggtgttgctaagggtgcactgtgcatgtccaggaaatactgcttctatcatggaataaataaaagcgtgtatagagatatatgtctcctgttttcaagaaacta

SEQ ID NO: 7745 - DNA, 121 bp, synthetic construct
  misc_feature 1..121: note = Description of artificial sequence: synthetic polynucleotide sequence
  source 1..121: mol_type = other DNA
aaagctagtggctacactggcagcttaatgccctctataacctgaaccaggattgaattcgagcatacataaagcaggacatgtatatggatttcatgtggcttcccagtagtctgctgga

SEQ ID NO: 7746 - DNA, 121 bp, synthetic construct
  misc_feature 1..121: note = Description of artificial sequence: synthetic polynucleotide sequence
  source 1..121: mol_type = other DNA
tgcccatccacaggtggtctatcacaaacttaattctcattgtcatgcttattaactgttgaaacttgatgttagaagttactagagactctgttccatttatgagcaatgcccctgccat

SEQ ID NO: 7747 - DNA, 121 bp, synthetic construct
  misc_feature 1..121: note = Description of artificial sequence: synthetic polynucleotide sequence
  source 1..121: mol_type = other DNA
tgagcacaacacagaatgcagctgcatctcaaattataaaacagagcattgatgcagtagatcaaaatcctgctatagtaccattggggaagaatagatggttctttggacacagtgatca

SEQ ID NO: 7748 - DNA, 121 bp, synthetic construct
  misc_feature 1..121: note = Description of artificial sequence: synthetic polynucleotide sequence
  source 1..121: mol_type = other DNA
cagaattttggggtttcttccttgtgatgcaaaccatgccgtatgcacaaatgtcatcaggtcctcattgtgcaaaacttggggaaattgactgaagccctgctaagatgctctgtaagta

SEQ ID NO: 7749 - DNA, 121 bp, synthetic construct
  misc_feature 1..121: note = Description of artificial sequence: synthetic polynucleotide sequence
  source 1..121: mol_type = other DNA
tgacctggaagatgagatggcaccagccatggttggggaggagctgtcagcatagaggagaaatggaccaacaggaggagaagccagccacagagagaaggagcccaaagaagagcattcc

SEQ ID NO: 7750 - DNA, 121 bp, synthetic construct
  misc_feature 1..121: note = Description of artificial sequence: synthetic polynucleotide sequence
  source 1..121: mol_type = other DNA
ccacatttagatctttaatccatctggaatccatgtacgtgtttgatgtgaaataggaacgtaattttactgtatgctgtgtaggtaaccaagaacccgtcctttcccagttaatttagta

SEQ ID NO: 7751 - DNA, 121 bp, synthetic construct
  misc_feature 1..121: note = Description of artificial sequence: synthetic polynucleotide sequence
  source 1..121: mol_type = other DNA
atgggaagcccatttagataacctggacatcaaacctgatgaaaaaagtgcttggatttaactggacctaggaagagtatattcaaggttatgattatagcataggattacctcactctta

SEQ ID NO: 7752 - DNA, 121 bp, synthetic construct
  misc_feature 1..121: note = Description of artificial sequence: synthetic polynucleotide sequence
  source 1..121: mol_type = other DNA
tccaaggaagattgtccttcatccattccaaagaaattgacctttatccagtccaaaagtcatttaattttgtctttaatatttctggtaatatagtgtccattacccatgtgaaaaatta

SEQ ID NO: 7753 - DNA, 121 bp, synthetic construct
  misc_feature 1..121: note = Description of artificial sequence: synthetic polynucleotide sequence
  source 1..121: mol_type = other DNA
gatttatgaaatatgttggagaacaggaattggtgcaggattttatgtcaaaagtgagggtcagcaaggacttaagaatgactcccaattttctgattggagcaactggtggataatggtg

SEQ ID NO: 7754 - DNA, 121 bp, synthetic construct
  misc_feature 1..121: note = Description of artificial sequence: synthetic polynucleotide sequence
  source 1..121: mol_type = other DNA
agcttcatacaccactgaaacaatcacacaaagttttctgtcccctcagaacctctaaagagcactctattttcttggtgcttgaaaataaagggagtgagtctcttttattatttacaag

SEQ ID NO: 7755 - DNA, 121 bp, synthetic construct
  misc_feature 1..121: note = Description of artificial sequence: synthetic polynucleotide sequence
  source 1..121: mol_type = other DNA
ctacatatgtatacatgtgcctggagtgtgatattttttgtgattgaacctccagaatcgtatcagcagttcctgagacttcacatctgtaaaatgtgtgctacacattttacacctctgc

SEQ ID NO: 7756 - DNA, 121 bp, synthetic construct
  misc_feature 1..121: note = Description of artificial sequence: synthetic polynucleotide sequence
  source 1..121: mol_type = other DNA
cagggactctacaatgactgtcaccaggagatgagatgagatggtagagatgggatattgccataagagcaaagggacctgggtggcagaggtcagtgcagctggctaactgagtactact

SEQ ID NO: 7757 - DNA, 121 bp, synthetic construct
  misc_feature 1..121: note = Description of artificial sequence: synthetic polynucleotide sequence
  source 1..121: mol_type = other DNA
gtgggtgtctgctacctggaaagagtttctccacattgtcatagagggcgtgcaggggtacatcccgacagtgatgatatttaaccatttccacggatgcaactttgccatttggctttaa

SEQ ID NO: 7758 - DNA, 121 bp, synthetic construct
  misc_feature 1..121: note = Description of artificial sequence: synthetic polynucleotide sequence
  source 1..121: mol_type = other DNA
gacgatacagatgtcatgctcacaggtgacactttgagcacctcattgcagtcttccccggaagtgcaggtacctcctacctccttcgaaacagaagaaacgccccgtcgggtacccccag

SEQ ID NO: 7759 - DNA, 121 bp, synthetic construct
  misc_feature 1..121: note = Description of artificial sequence: synthetic polynucleotide sequence
  source 1..121: mol_type = other DNA
ttaaaggtggatgtcgtcctggccgaatctgctctcctgtcggcagctgcccccatggacaagcattccaagtagtcgggtggggggatgacaacactgctattctcagacaagttcacgg

SEQ ID NO: 7760 - DNA, 121 bp, synthetic construct
  misc_feature 1..121: note = Description of artificial sequence: synthetic polynucleotide sequence
  source 1..121: mol_type = other DNA
ttaatattgaatgaaagtgctttaggctgttaagaaaacattactgtaaaacgtgtaagtataatgatcccattctggatacagtttatgagatcccctgtatggaaaacaggcaaacggg

SEQ ID NO: 7761 - DNA, 121 bp, synthetic construct
  misc_feature 1..121: note = Description of artificial sequence: synthetic polynucleotide sequence
  source 1..121: mol_type = other DNA
aggctccgtgcacatggcgggtttcttcagaccatccttgcattcctgctattttcatgcttgtattcttgcttgctgtctctgagacaaagtagcaaacataagacaccaggttggccaa

SEQ ID NO: 7762 - DNA, 121 bp, synthetic construct
  misc_feature 1..121: note = Description of artificial sequence: synthetic polynucleotide sequence
  source 1..121: mol_type = other DNA
cagcagtcagcggcagtgacccagacagagaccgggaattccccgggcacgtggccgaccacacggatggtggagctgagacccttctccatcttgccagtaagcaccagcggggtgtgga

SEQ ID NO: 7763 - DNA, 121 bp, synthetic construct
  misc_feature 1..121: note = Description of artificial sequence: synthetic polynucleotide sequence
  source 1..121: mol_type = other DNA
ccaaaagaaaaatggcgtttgttgcaacacagggggccacggtggttgaccagaccactttgatgaaaaagtaccttcagtttgtggcagctctcacagatgtgaatacacgtgagttgat

SEQ ID NO: 7764 - DNA, 121 bp, synthetic construct
  misc_feature 1..121: note = Description of artificial sequence: synthetic polynucleotide sequence
  source 1..121: mol_type = other DNA
atttcaattacctgatgcttgttttgccgttcacagctgatgaaacaaagttgaaaatgatgcaagaagttagtgaaaattttgaggtatgagcattatattttctatttttcattttgag

SEQ ID NO: 7765 - DNA, 121 bp, synthetic construct
  misc_feature 1..121: note = Description of artificial sequence: synthetic polynucleotide sequence
  source 1..121: mol_type = other DNA
attagaatgtcacgtcatctcctcagtattctacattcctagaacatatcatccctcgattccttacatttctccaagatggagaagttcagtttcttcaggagaaaccagcacaggtaat

SEQ ID NO: 7766 - DNA, 121 bp, synthetic construct
  misc_feature 1..121: note = Description of artificial sequence: synthetic polynucleotide sequence
  source 1..121: mol_type = other DNA
cttgccagcaactgcggaagctcgtacttgaaataattcatagaataccaaccaacgaacatcttcgtcctcacacaaaaaatgttttgtctgtgatgtttcgctttttagaggtaagttt

SEQ ID NO: 7767 - DNA, 121 bp, synthetic construct
  misc_feature 1..121: note = Description of artificial sequence: synthetic polynucleotide sequence
  source 1..121: mol_type = other DNA
attaaatgcttttttttagacggaaaatgaagaaaatgttcttatttgtctaagaataattattgagctacacaaacagttcaggccaccgatcacacaagaagtaagttgtttaaaatcc

SEQ ID NO: 7768 - DNA, 121 bp, synthetic construct
  misc_feature 1..121: note = Description of artificial sequence: synthetic polynucleotide sequence
  source 1..121: mol_type = other DNA
cttcctataacgaaagtgtctgctttttttagattcatcattttctggattttgtgaaacagatttacaaggagcttccaaaagtagtggtatgtttttactttggttttaattagttaca

SEQ ID NO: 7769 - DNA, 121 bp, synthetic construct
  misc_feature 1..121: note = Description of artificial sequence: synthetic polynucleotide sequence
  source 1..121: mol_type = other DNA
ccgctactttgagaaccctcaagtgatccccgagaacacagtgcctcccccagaaatggttggtatgataacaacgattgctgtgaaagtcaacccggagcgtgaggacagtgagactcga

SEQ ID NO: 7770 - DNA, 121 bp, synthetic construct
  misc_feature 1..121: note = Description of artificial sequence: synthetic polynucleotide sequence
  source 1..121: mol_type = other DNA
cctacccatttctgtcttccagcattccatcattccgaggggatcactttctctgaaagtgttggcagaattgcccattattgttgttttaatgtatcaggtatgtgtattgctcattagt

SEQ ID NO: 7771 - DNA, 121 bp, synthetic construct
  misc_feature 1..121: note = Description of artificial sequence: synthetic polynucleotide sequence
  source 1..121: mol_type = other DNA
gtatgtttgcttttagctctacaaactgaacatccacaatgttgttgctgagtttgtgcccttgatcatgaacaccattgccattcaggtgtctgcacaagcgaggtgaggcgtcactgta

SEQ ID NO: 7772 - DNA, 121 bp, synthetic construct
  misc_feature 1..121: note = Description of artificial sequence: synthetic polynucleotide sequence
  source 1..121: mol_type = other DNA
cttcttattcaggcaacataagctttacaacaaggagttgtatgctgacttcattgctgctcagattaaaacattgtcatttttagcttacattatcaggatttaccaggtaaggtcattg

SEQ ID NO: 7773 - DNA, 140 bp, synthetic construct
  misc_feature 1..140: note = Description of artificial sequence: synthetic polynucleotide sequence
  source 1..140: mol_type = other DNA
ggagttggtgactaagtattctcagcagatggtgaaaggaatgctccagttactttcaaattgtccagcagagactgcacacctcagaaaggagcttctgattgctgccaaacacatcctcaccacagagctgagaaacc

SEQ ID NO: 7774 - DNA, 121 bp, synthetic construct
  misc_feature 1..121: note = Description of artificial sequence: synthetic polynucleotide sequence
  source 1..121: mol_type = other DNA
caatggatgtttgtcttctagagttcattccttgcatggacaagctgtttgatgaatccatactaattggctcaggatatactgccagagagactctaaggtatgagattaaaccagtgat

SEQ ID NO: 7775 - DNA, 236 bp, synthetic construct
  misc_feature 1..236: note = Description of artificial sequence: synthetic polynucleotide sequence
  source 1..236: mol_type = other DNA
ggcccctcgcctacagcacgctggccgacctcgtgcaccatgtccgccagcacctgcccctcagcgacctctccctcgccgtccagctcttcgccaagaacatcgacgatgagtccctgcccagcagcatccagaccatgtcctgcaagctcctgctgaacctggtggactgcatccgttccaagagcgagcaggagagtggcaatgggagagacgtcctgatgcggatgctggag

SEQ ID NO: 7776 - DNA, 121 bp, synthetic construct
  misc_feature 1..121: note = Description of artificial sequence: synthetic polynucleotide sequence
  source 1..121: mol_type = other DNA
ggttttcgttctcaaattccacacaattgctcggtaccagctctctgccatttttaagaagtgtaagcctcagtcagaacttggagccgtggaagcagctctgcctggggtgcccactgcc

SEQ ID NO: 7777 - DNA, 121 bp, synthetic construct
  misc_feature 1..121: note = Description of artificial sequence: synthetic polynucleotide sequence
  source 1..121: mol_type = other DNA
cctgcagctcctggccctgctccctccccagcccctgtccctgccccacctccacccccgcccccacccccacctgccacccctgtgaccccggcccccgtgcctcccttcgagaagcaag

SEQ ID NO: 7778 - DNA, 121 bp, synthetic construct
  misc_feature 1..121: note = Description of artificial sequence: synthetic polynucleotide sequence
  source 1..121: mol_type = other DNA
gaaaaggacaaggaagacaagcagacattccaagtcacagactgtcgaagtttggtcaaaaccttggtgtgtggtgtcaagacaatcacgtggggcataacatcatgcaaagcacctggtg

SEQ ID NO: 7779 - DNA, 121 bp, synthetic construct
  misc_feature 1..121: note = Description of artificial sequence: synthetic polynucleotide sequence
  source 1..121: mol_type = other DNA
tctcttttccagaagctcagttcattcccaacaagcagttacaacccaaagagacacagatttacatcaaacttgtgaaatatgcaatgcaagctttagatatttatcaggtaaggaagtg

SEQ ID NO: 7780 - DNA, 196 bp, synthetic construct
  misc_feature 1..196: note = Description of artificial sequence: synthetic polynucleotide sequence
  source 1..196: mol_type = other DNA
ggtccagatagcaggaaatggacagacatacatccgtgtggccaactgccagactgtgagaatgaaagaggagaaggaggtattggagcatttcgctggtgtgttcacaatgatgaaccccttaacgttcaaagaaatcttccaaactacggtcccttatatggtggagagaatctcaaaaaattatgctcttcag

SEQ ID NO: 7781 - DNA, 193 bp, synthetic construct
  misc_feature 1..193: note = Description of artificial sequence: synthetic polynucleotide sequence
  source 1..193: mol_type = other DNA
gattgttgccaattccttcttggcaaatcctactacctctgctctgtttgctacgattctggtggaatatctccttgatcgcctgccagaaatgggctccaacgtggagctctccaacctgtacctcaagctgttcaagctggtctttggctctgtctccctctttgcagctgaaaatgaacaaatgctgaag

SEQ ID NO: 7782 - DNA, 167 bp, synthetic construct
  misc_feature 1..167: note = Description of artificial sequence: synthetic polynucleotide sequence
  source 1..167: mol_type = other DNA
gcctcacttgcacaagattgtgaacagctctatggagctcgcgcagactgccaaggaaccctacaactacttcttgctgctacgggcgctgtttcgctctattggtggaggtagccacgatctcttgtatcaggagttcttgcctctccttccaaacctcctgcaag

SEQ ID NO: 7783 - DNA, 258 bp, synthetic construct
  misc_feature 1..258: note = Description of artificial sequence: synthetic polynucleotide sequence
  source 1..258: mol_type = other DNA
gggctgaacatgcttcagagtggcctgcacaagcagcacatgaaggacctctttgtggagctgtgtctcaccgtccctgtgcggctgagctcgcttttgccgtacctgcccatgcttatggatcccttggtgtctgcactcaatgggtctcagacattggtcagccaaggcctcaggacgctggagctgtgtgtggacaacctgcagcccgacttcctctacgaccacatccagccggtgcgcgcagagctcatgcag

SEQ ID NO: 7784 - DNA, 202 bp, synthetic construct
  misc_feature 1..202: note = Description of artificial sequence: synthetic polynucleotide sequence
  source 1..202: mol_type = other DNA
ggctctgtggcgcaccttacgcaaccctgctgacagcatctcccacgtggcctaccgtgtgctcggtaagtttggcggcagtaacaggaagatgctgaaggagtcgcagaagctgcactacgttgtgaccgaggttcagggccccagcatcactgtggagttttccgactgcaaagcttctctccagctccccatggagaag

SEQ ID NO: 7785 - DNA, 153 bp, synthetic construct
  misc_feature 1..153: note = Description of artificial sequence: synthetic polynucleotide sequence
  source 1..153: mol_type = other DNA
ggccattgaaactgctctggactgcctgaaaagcgccaacactgagccctactaccggaggcaggcgtgggaagtgatcaaatgcttcctggtggccatgatgagcctggaggacaacaagcacgcactctaccagctcctggcacaccccaa

SEQ ID NO: 7786 - DNA, 201 bp, synthetic construct
  misc_feature 1..201: note = Description of artificial sequence: synthetic polynucleotide sequence
  source 1..201: mol_type = other DNA
gctttacagaaaagaccatccccaatgttatcatctcacatcgctacaaagcccaggacactccagcccggaagacttttgagcaggccctgacaggcgccttcatgtctgctgtcattaaggacctgcggcccagcgccctgccctttgtcgccagcttgatccgccactatacgatggtggcagtcgcccagcagtgtg

SEQ ID NO: 7787 - DNA, 219 bp, synthetic construct
  misc_feature 1..219: note = Description of artificial sequence: synthetic polynucleotide sequence
  source 1..219: mol_type = other DNA
ggccctttcttgctgccttgctaccaggtgggcagccagcccagcacagccatgtttcacagtgaagaaaatggctcgaaaggaatggatcctttggttctcattgatgcaattgctatttgtatggcatatgaagaaaaggagctttgcaaaatcggggaggtggccctagctgtgatatttgatgttgcaagtatcatcctgggctccaaggagagg

SEQ ID NO: 7788 - DNA, 199 bp, synthetic construct
  misc_feature 1..199: note = Description of artificial sequence: synthetic polynucleotide sequence
  source 1..199: mol_type = other DNA
ggcctgccagctgcccctgttttcttacatcgtggagcgcctgtgtgcatgttgttatgaacaggcgtggtatgcaaagctggggggtgtggtgtctattaagtttctcatggagcggctgcctctcacttgggttctccagaaccagcagacattcctgaaagcacttctctttgtcatgatggacttaactggagag

SEQ ID NO: 7789 - DNA, 262 bp, synthetic construct
  misc_feature 1..262: note = Description of artificial sequence: synthetic polynucleotide sequence
  source 1..262: mol_type = other DNA
ggtttccaatggggcagtcgctatggcaaagaccacgctggagcagcttctgatgcggtgcgcaacgcctttaaaagacgaggagagagccgaagagatcgtggccgcccaggaaaagtctttccaccatgtgacacacgacttggttcgagaagtcacctctccaaactccactgtgaggaagcaggccatgcattcgctgcaggtgttggcccaggtcactgggaagagtgtcacggtgatcatggaaccccacaaagag

SEQ ID NO: 7790 - DNA, 163 bp, synthetic construct
  misc_feature 1..163: note = Description of artificial sequence: synthetic polynucleotide sequence
  source 1..163: mol_type = other DNA
ggtcctgcaggatatggtcccccctaagaagcacctgctccgacaccagcctgccaacgcacagattggcctgatggaggggaacacgttctgtaccacgttgcagcccaggctcttcacaatggaccttaacgtggtggagcataaggtgttctacacagag

SEQ ID NO: 7791 - DNA, 121 bp, synthetic construct
  misc_feature 1..121: note = Description of artificial sequence: synthetic polynucleotide sequence
  source 1..121: mol_type = other DNA
tatcttttgcagctgttgaatttgtgtgaggctgaagattcagctttaacaaagctgccctgttataaaagccttccgtcactcgtacctttacgaattgcggcattaagtaagttaatga

SEQ ID NO: 7792 - DNA, 121 bp, synthetic construct
  misc_feature 1..121: note = Description of artificial sequence: synthetic polynucleotide sequence
  source 1..121: mol_type = other DNA
atgcacttgctgcctgcaattaccttcctcagtccagggagaaaatcatcgctgcactcttcaaagccctgaattccaccaatagtgagctccaagaggccggagaagcctgtatgagaaa

SEQ ID NO: 7793 - DNA, 172 bp, synthetic construct
  misc_feature 1..172: note = Description of artificial sequence: synthetic polynucleotide sequence
  source 1..172: mol_type = other DNA
gtttttagaaggtgctaccatagaagtcgatcaaatccacacacatatgcgacctttgctgatgatgctgggagattaccggagcttgacgctgaatgttgtgaatcgcctgacttcggtcacgaggctcttcccaaattccttcaatgataaattttgtgatcagatgatg

SEQ ID NO: 7794 - DNA, 121 bp, synthetic construct
  misc_feature 1..121: note = Description of artificial sequence: synthetic polynucleotide sequence
  source 1..121: mol_type = other DNA
tgtctcaggatgtgtttttccaacagcaacatctgcgcaagtggatggaagtggtggtgatcacccacaaagggggccagaggagcgacggaaacgtgagtgacttgtttgtttctgggaa

SEQ ID NO: 7795 - DNA, 121 bp, synthetic construct
  misc_feature 1..121: note = Description of artificial sequence: synthetic polynucleotide sequence
  source 1..121: mol_type = other DNA
atagaaaaaagatgattttcctccccatcctcaggaaagcatttccgagtgcgggagatgtcccttgtctccattctgtcagtttgaggtgagaacaacctattaacagtcagtttctgac

SEQ ID NO: 7796 - DNA, 121 bp, synthetic construct
  misc_feature 1..121: note = Description of artificial sequence: synthetic polynucleotide sequence
  source 1..121: mol_type = other DNA
ggaaatgaagatttgctcagcaattataaacctttttcatctgatcccggctgctcctcagacactggtgaagcctttgctagaggttgtcatgaaaacggagcgggcgatgctgatcgag

SEQ ID NO: 7797 - DNA, 121 bp, synthetic construct
  misc_feature 1..121: note = Description of artificial sequence: synthetic polynucleotide sequence
  source 1..121: mol_type = other DNA
ggcggggagtccattccgagagcccctgatcaagttcctgactcgacatccctcgcagacagtggagctgttcatgatggaagccacactgaacgatccccagtggagcagaatgtttatg

SEQ ID NO: 7798 - DNA, 166 bp, synthetic construct
  misc_feature 1..166: note = Description of artificial sequence: synthetic polynucleotide sequence
  source 1..166: mol_type = other DNA
gagttttttaaaacacaaagacgccagacctctgcgggatgtgctggctgccaaccccaacaggttcatcaccctgctgctgccggggggtgcccagacggctgtgcgccccggttcgcccagcaccagcaccatgcgcctggacctccagttccaggccatcaag

SEQ ID NO: 7799 - DNA, 183 bp, synthetic construct
  misc_feature 1..183: note = Description of artificial sequence: synthetic polynucleotide sequence
  source 1..183: mol_type = other DNA
gatcataagcattatagtgaaaaacgatgactcctggctggccagccagcactctctggtgagccagttgcgacgtgtgtgggtgagtgagaacttccaagagaggcaccgcaaggagaacatggcagccaccaactggaaggagcccaagctgctggcctactgcctgctgaactactgcaa

SEQ ID NO: 7800 - DNA, 200 bp, synthetic construct
  misc_feature 1..200: note = Description of artificial sequence: synthetic polynucleotide sequence
  source 1..200: mol_type = other DNA
gaaggaattacggagatatagaattgctgttccagctgctccgagcctttactggtcgttttctctgcaacatgacattcttaaaagagtatatggaggaagagattcccaaaaattacagcatcgctcagaaacgtgccctgttctttcgctttgtagacttcaacgaccccaacttcggagatgaattaaaagctaaa

SEQ ID NO: 7801 - DNA, 121 bp, synthetic construct
  misc_feature 1..121: note = Description of artificial sequence: synthetic polynucleotide sequence
  source 1..121: mol_type = other DNA
tgcagcatatcttgaatcctgctttcttgtacagctttgagaagggggaaggagagcagctcttgggacctcccaatccagaaggagataacccagaaagcatcaccagtgtgtttattac

SEQ ID NO: 7802 - DNA, 268 bp, synthetic construct
  misc_feature 1..268: note = Description of artificial sequence: synthetic polynucleotide sequence
  source 1..268: mol_type = other DNA
ggtcctggaccccgagaagcaggcggacatgctggactcgctgcggatctacctgctgcagtacgccacgctgctggtggagcacgccccccaccacatccatgacaacaacaagaaccgcaacagcaagctgcgccgcctcatgaccttcgcctggccctgcctgctctccaaggcctgcgtggacccagcctgcaagtacagcggacacttgctcctggcgcacattatcgccaaattcgccatacacaagaagatcgtcctgcag

SEQ ID NO: 7803 - DNA, 208 bp, synthetic construct
  misc_feature 1..208: note = Description of artificial sequence: synthetic polynucleotide sequence
  source 1..208: mol_type = other DNA
ggtttttcatagtctcctcaaggctcacgcaatggaagctcgagcgatcgtcagacaggcgatggccattctgaccccggcggtgccggccaggatggaggacgggcaccagatgctgacccactggacccggaagatcattgtggaggaggggcacaccgtcccgcagctggtccacattctgcacctgatagtgcaacacttcaag

SEQ ID NO: 7804 - DNA, 160 bp, synthetic construct
  misc_feature 1..160: note = Description of artificial sequence: synthetic polynucleotide sequence
  source 1..160: mol_type = other DNA
ggtgtactacccggtacggcaccacttggtgcagcacatggtgagcgccatgcagaggctgggcttcacgcccagtgtcaccatcgagcagaggcggctggccgtggacctgtctgaagtcgtcatcaagtgggagctgcagaggatcaaggaccagcag

SEQ ID NO: 7805 - DNA, 136 bp, synthetic construct
  misc_feature 1..136: note = Description of artificial sequence: synthetic polynucleotide sequence
  source 1..136: mol_type = other DNA
gccggattcagatatggacccaaattccagtggagaaggagtcaattctgtctcatcctccattaagagaggcctgtccgtggattctgcccaggaagtgaaacgctttaggacggccaccggagccatcagtgca

SEQ ID NO: 7806 - DNA, 121 bp, synthetic construct
  misc_feature 1..121: note = Description of artificial sequence: synthetic polynucleotide sequence
  source 1..121: mol_type = other DNA
tccaggtctttgggaggagccagtcgctacctggagcagactctctcctcgccaagcccattgacaagcagcacacagacactgtggtgaacttccttatccgcgtggcctgtcaggtacg

SEQ ID NO: 7807 - DNA, 148 bp, synthetic construct
  misc_feature 1..148: note = Description of artificial sequence: synthetic polynucleotide sequence
  source 1..148: mol_type = other DNA
ggttaatgacaacaccaacacagcggggtcccctggggaggtgctctctcgccggtgtgtgaaccttctgaagactgcgttgcggccagacatgtggcccaagtccgaactcaagctgcagtggttcgacaagctgctgatgactgtg

SEQ ID NO: 7808 - DNA, 215 bp, synthetic construct
  misc_feature 1..215: note = Description of artificial sequence: synthetic polynucleotide sequence
  source 1..215: mol_type = other DNA
ggagcagccaaaccaagtgaactatgggaatatctgcacgggcctagaagtgctgagcttcctgctaactgtcctccagtccccagccatcctcagtagcttcaaacctctgcagcgtggaattgccgcctgcatgacatgtggaaacaccaaggtgttgcgagccgtccacagccttctctcgcgcctgatgagcattttcccaacagagccga

SEQ ID NO: 7809 - DNA, 121 bp, synthetic construct
  misc_feature 1..121: note = Description of artificial sequence: synthetic polynucleotide sequence
  source 1..121: mol_type = other DNA
acttccagtgtggcctccaaatatgaagagctggagtgcctctacgcagccgtcggaaaggtcatctatgaagggctcaccaactacgagaaggccaccaatgccaatccctcccagctct

SEQ ID NO: 7810 - DNA, 148 bp, synthetic construct
  misc_feature 1..148: note = Description of artificial sequence: synthetic polynucleotide sequence
  source 1..148: mol_type = other DNA
gggacccttatgatcctcaagtctgcctgcagcaacaaccccagctacatagacaggctgatctccgtctttatgcgctccctgcagaagatggtccgggagcatttaaaccctcaggcagcgtcaggaagcaccgaagccacctcag

SEQ ID NO: 7811 - DNA, 201 bp, synthetic construct
  misc_feature 1..201: note = Description of artificial sequence: synthetic polynucleotide sequence
  source 1..201: mol_type = other DNA
ggtacaagcgagctggtgatgctgagtctggagctggtgaagacgcgcctggcagtgatgagcatggagatgcggaagaacttcatccaggccatcctgacatccctcatcgaaaaatcaccagatgccaaaatcctccgggctgtggtcaaaatcgtggaagaatgggtcaagaataactccccaatggcagccaatcag

SEQ ID NO: 7812 - DNA, 121 bp, synthetic construct
  misc_feature 1..121: note = Description of artificial sequence: synthetic polynucleotide sequence
  source 1..121: mol_type = other DNA
acacctacactccgggagaagtccattttgcttgtgaagatgatgacttacatagaaaaacgctttccggaagaccttgaattaaatgcccagtttttagatcttgttaactatgtctaca

SEQ ID NO: 7813 - DNA, 215 bp, synthetic construct
  misc_feature 1..215: note = Description of artificial sequence: synthetic polynucleotide sequence
  source 1..215: mol_type = other DNA
gggatgagaccctctctggcagcgagctgacggcgaaacttgagcctgcctttctctctgggctgcgctgtgcccagccactcatcagggcaaagtttttcgaggtttttgacaactccatgaaacgtcgtgtctacgagcgcttgctctatgtgacctgttcgcagaactgggaagccatggggaaccacttctggatcaagcagtgcattgag

SEQ ID NO: 7814 - DNA, 181 bp, synthetic construct
  misc_feature 1..181: note = Description of artificial sequence: synthetic polynucleotide sequence
  source 1..181: mol_type = other DNA
gctgcttctggccgtgtgtgagaagagcacccccattggcaccagctgccaaggagccatgctcccgtccatcaccaacgtcatcaacctggccgatagccacgaccgtgccgccttcgccatggtcacacatgtcaagcaggagccccgggagcgggagaacagcgagtccaaagaggag

SEQ ID NO: 7815 - DNA, 148 bp, synthetic construct
  misc_feature 1..148: note = Description of artificial sequence: synthetic polynucleotide sequence
  source 1..148: mol_type = other DNA
ggatgtagagatagacatcgaactagctcctggggatcagaccagcacgcccaaaaccaaagaactttcagaaaaggacattggaaaccagctgcacatgctaaccaacaggcacgacaagtttctggacactctccgagaggtgaag

SEQ ID NO: 7816 - DNA, 121 bp, synthetic construct
  misc_feature 1..121: note = Description of artificial sequence: synthetic polynucleotide sequence
  source 1..121: mol_type = other DNA
gactggagcgctgctcagcgctttcgttcagctgtgccacatttccacgacgctggcagagaagacgtgggtccagcttttccccagattgtggaagatcctctctgacagacagcagcat

SEQ ID NO: 7817 - DNA, 289 bp, synthetic construct
  misc_feature 1..289: note = Description of artificial sequence: synthetic polynucleotide sequence
  source 1..289: mol_type = other DNA
ggcactcgcgggtgagataagtccatttctgtgcagcggcagtcaccaggtgcagcgggactgccagcccagcgcgctgaactgctttgtggaagccatgtcccagtgcgtgccgccaatccccatccgaccctgcgtcctgaagtacctggggaagacacacaacctctggttccggtccacgctgatgttggagcaccaggcttttgaaaagggtctgagtcttcagattaagccgaagcaaacaacggagttttatgagcaggagagcatcaccccgccgcagcag

SEQ ID NO: 7818 - DNA, 139 bp, synthetic construct
  misc_feature 1..139: note = Description of artificial sequence: synthetic polynucleotide sequence
  source 1..139: mol_type = other DNA
ggagatactggattcccttgcggagctttactccctgttacaagaggaagatatgtgggctggtctgtggcagaagcggtgcaagtactcggagacagcgactgcgattgcttacgagcagcacgggttctttgagcag

SEQ ID NO: 7819 - DNA, 121 bp, synthetic construct
  misc_feature 1..121: note = Description of artificial sequence: synthetic polynucleotide sequence
  source 1..121: mol_type = other DNA
ttaggcacaagaatcctatgaaaaggcaatggataaagccaaaaaagaacatgagaggagtaacgcctcccctgctattttccctgaataccagctctgggaagaccactggattcggtaa

SEQ ID NO: 7820 - DNA, 137 bp, synthetic construct
  misc_feature 1..137: note = Description of artificial sequence: synthetic polynucleotide sequence
  source 1..137: mol_type = other DNA
gatgctccaaggaattgaaccagtgggaagccctgacggagtacggtcagtccaaaggccacatcaacccctacctcgtcctggagtgcgcctggcgggtgtccaactggactgccatgaaggaggcgctggtgcag

SEQ ID NO: 7821 - DNA, 193 bp, synthetic construct
  misc_feature 1..193: note = Description of artificial sequence: synthetic polynucleotide sequence
  source 1..193: mol_type = other DNA
ggtggaagtgagctgtccgaaggagatggcctggaaggtgaacatgtaccgcggatacctggccatctgccaccccgaggagcagcagctcagcttcatcgagcgcctggtggagatggccagcagcctggccatccgcgagtggcggcggctgccccacgtagtgtcccacgtgcacacgcctctcctacag

SEQ ID NO: 7822 - DNA, 230 bp, synthetic construct
  misc_feature 1..230: note = Description of artificial sequence: synthetic polynucleotide sequence
  source 1..230: mol_type = other DNA
ggcagcccagcaaatcatcgaactccaggaagctgcacaaatcaacgcaggcttacagccaaccaacctgggaaggaacaacagcctgcacgacatgaagacggtggtgaagacctggaggaaccgactgcccatcgtgtctgacgacttgtcccactggagcagcatcttcatgtggaggcagcatcattaccagggtaaaccgacctggtccggcatgcattcatcat

SEQ ID NO: 7823 - DNA, 267 bp, synthetic construct
  misc_feature 1..267: note = Description of artificial sequence: synthetic polynucleotide sequence
  source 1..267: mol_type = other DNA
gcgattgtaactgcctatgagaatagctctcagcatgatcccagttcaaataacgctatgcttggggttcatgcatcagcttcagcgatcatccagtatggaaaaatcgcccggaaacaaggactggtcaatgtagctctggatatattaagtcggattcatactattccaactgttcctatcgtggattgcttccagaagattcgacagcaagttaaatgctacctccagctggcaggcgtcatgggcaaaaacgagtgcatgcag

SEQ ID NO: 7824 - DNA, 121 bp, synthetic construct
  misc_feature 1..121: note = Description of artificial sequence: synthetic polynucleotide sequence
  source 1..121: mol_type = other DNA
ttttgaacagggccttgaagttattgaatctacaaatttaaaatacttcacaaaagagatgacagccgaattttatgcactgaagggaatgttcttggctcagatcaacaagtatgtatgt

SEQ ID NO: 7825 - DNA, 203 bp, synthetic construct
  misc_feature 1..203: note = Description of artificial sequence: synthetic polynucleotide sequence
  source 1..203: mol_type = other DNA
ggtccgaggaggcaaacaaagccttctctgcagctgtgcagatgcacgatgtgctggtgaaagcctgggccatgtggggcgactacctggagaacatctttgtgaaggagcggcagctgcacctgggcgtgtctgccatcacctgctacctgcacgcctgccggcatcagaacgagagcaaatcgaggaaatacttagccaag

SEQ ID NO: 7826 - DNA, 166 bp, synthetic construct
  misc_feature 1..166: note = Description of artificial sequence: synthetic polynucleotide sequence
  source 1..166: mol_type = other DNA
ggtgctgtggcttttgagttttgatgatgacaaaaacactttggcagatgccgtcgacaagtactgcattggtgtgccacccatccagtggctggcctggatcccacagctgctcacctgcctggttggctcggagggaaagctgctcttgaacctcattagccag

SEQ ID NO: 7827 - DNA, 121 bp, synthetic construct
  misc_feature 1..121: note = Description of artificial sequence: synthetic polynucleotide sequence
  source 1..121: mol_type = other DNA
cttgtctctgagcaggttggacgcgtgtatccccaagcggtctactttcccatccggaccctgtacctgaccctgaaaatagaacagcgggaacgctacaagagcggtacgtctcgggtgg

SEQ ID NO: 7828 - DNA, 147 bp, synthetic construct
  misc_feature 1..147: note = Description of artificial sequence: synthetic polynucleotide sequence
  source 1..147: mol_type = other DNA
gatccagggcccataagagcaacagcacccatgtggcgctgcagccgaatcatgcacatgcagcgagagctccaccccacccttctgtcttccctggaaggcatcgtcgatcagatggtctggttcagagaaaattggcatgaagag

SEQ ID NO: 7829 - DNA, 263 bp, synthetic construct
  misc_feature 1..263: note = Description of artificial sequence: synthetic polynucleotide sequence
  source 1..263: mol_type = other DNA
ggttctcaggcagctccaacagggcctggcgaaatgttactccgtggcgtttgagaaaagtggagcggtgtccgatgctaaaatcaccccccacactctcaattttgtgaagaagttggtgagcacgtttggggtgggcctggagaatgtgtccaacgtctcgaccatgttctccagcgcagcctctgagtctctggcccggcgggcgcaggccactgcacaagaccctgtctttcagaagctgaaaggccagttcacgacgg

SEQ ID NO: 7830 - DNA, 227 bp, synthetic construct
  misc_feature 1..227: note = Description of artificial sequence: synthetic polynucleotide sequence
  source 1..227: mol_type = other DNA
gattttgacttcagcgttccaggatccatgaagcttcataatcttatttctaagttgaaaaagtggatcaaaatcttggaggccaagaccaagcaactccccaaattcttcctcatagaggaaaagtgccggttcttgagcaatttctcggcacagacagctgaagtggaaattcctggggagtttctgatgccaaagccaacgcattattacatcaagattgcacg

SEQ ID NO: 7831 - DNA, 219 bp, synthetic construct
  misc_feature 1..219: note = Description of artificial sequence: synthetic polynucleotide sequence
  source 1..219: mol_type = other DNA
ggttcatgccccgggtagagattgtgcagaagcacaacaccgcagcccggcggctgtacatccggggacacaatggcaagatctacccatacctcgtcatgaacgacgcctgcctcacagagtcacggcgagaggagcgtgtgttgcagctgctgcgtctgctgaacccctgtttggagaagagaaaggagaccaccaagaggcacttgtttttcacag

SEQ ID NO: 7832 - DNA, 186 bp, synthetic construct
  misc_feature 1..186: note = Description of artificial sequence: synthetic polynucleotide sequence
  source 1..186: mol_type = other DNA
gtgccccgggttgtggcagtttccccacagatgcgcctcgtggaggacaacccctcttcactttcccttgtggagatctacaagcagcgctgcgccaagaagggcatcgagcatgacaaccccatctcccgttactatgaccggctggctacggtgcaggcgcggggaacccaagccagccaccag

SEQ ID NO: 7833 - DNA, 205 bp, synthetic construct
  misc_feature 1..205: note = Description of artificial sequence: synthetic polynucleotide sequence
  source 1..205: mol_type = other DNA
ggtcctccgcgacatcctcaaggaggttcagagtaacatggtgccgcgcagcatgctcaaggagtgggcgctgcacaccttccccaatgccacggactactggacgttccggaagatgttcaccatccagctggctctgataggcttcgcggaattcgtcctgcatttaaatagactcaaccccgagatgttacagatcgctcag

SEQ ID NO: 7834 - DNA, 196 bp, synthetic construct
  misc_feature 1..196: note = Description of artificial sequence: synthetic polynucleotide sequence
  source 1..196: mol_type = other DNA
ggacactggcaaactgaatgttgcctactttcgatttgacataaacgacgcgactggagacctggatgccaaccgtcctgtcccatttcgactcacgcccaacatttctgagtttctgaccaccatcggggtctccggcccgttgacagcgtccatgattgcggtcgcccggtgcttcgcccagccaaactttaag

SEQ ID NO: 7835 - DNA, 286 bp, synthetic construct
  misc_feature 1..286: note = Description of artificial sequence: synthetic polynucleotide sequence
  source 1..286: mol_type = other DNA
ggtggatggcattctgaaaacggttctccgggacgagatcattgcttggcacaaaaaaacacaagaggacacgtcctctcctctctcggccgccgggcagccagagaacatggacagccagcaactggtgtccctggttcagaaagccgtcaccgccatcatgacccgcctgcacaacctcgcccagttcgaaggcggggaaagcaaggtgaacaccctggtggccgcggcaaacagcctggacaatctgtgccgcatggaccccgcctggcacccctggctgtga

SEQ ID NO: 7836 - DNA, 121 bp, synthetic construct
  misc_feature 1..121: note = Description of artificial sequence: synthetic polynucleotide sequence
  source 1..121: mol_type = other DNA
tgggggagcacgttcagcatacccgcatcaatggccatctgcgtctgctcatctgtgcccgtgacaatgttccccacggtgcggagagaaggagtctggaagagcaaggctagaagtctaa

SEQ ID NO: 7837 - DNA, 121 bp, synthetic construct
  misc_feature 1..121: note = Description of artificial sequence: synthetic polynucleotide sequence
  source 1..121: mol_type = other DNA
tgtcccttcctgcacatcgaccccgagtccaagatcaaggactgtccttggtatgaccgtggcttctgcaagcacggtaggtgccagggtgggctgggccccgggcaagaagccagtcctc

SEQ ID NO: 7838 - DNA, 121 bp, synthetic construct
  misc_feature 1..121: note = Description of artificial sequence: synthetic polynucleotide sequence
  source 1..121: mol_type = other DNA
acccacgaagagaagtcttatggctgtgtggagtgtgggaagggctttaccctgagagaatacctgatgaagcaccagagaacccacctgggaaagaggccctacgtgtgcagcgagtgct

SEQ ID NO: 7839 - DNA, 121 bp, synthetic construct
  misc_feature 1..121: note = Description of artificial sequence: synthetic polynucleotide sequence
  source 1..121: mol_type = other DNA
agcccacaaaggagatagatttcttgccagataggtagttggtagccatcttcaggatgattgtggagacatgcatcagatccatgagggagagctggctgagcaggaaatacattggtgt

SEQ ID NO: 7840 - DNA, 121 bp, synthetic construct
  misc_feature 1..121: note = Description of artificial sequence: synthetic polynucleotide sequence
  source 1..121: mol_type = other DNA
ttcatgtccagaggttcaaactgggaggggggctgccggctgtgctggtgcacataggtgatgtgctgggccaacctggacagagggaaggttagaaggaacaccctttttagggctacgc

SEQ ID NO: 7841 - DNA, 121 bp, synthetic construct
  misc_feature 1..121: note = Description of artificial sequence: synthetic polynucleotide sequence
  source 1..121: mol_type = other DNA
ttcctgcgatgagaacagaggcacaggtgccggccctgcagcccccagaacctggactggagggggccatggggcaccggaccctggtcctgccctgggtgctgctgaccttgtgtgtcac

SEQ ID NO: 7842 - DNA, 121 bp, synthetic construct
  misc_feature 1..121: note = Description of artificial sequence: synthetic polynucleotide sequence
  source 1..121: mol_type = other DNA
cggcatagacaccggggacagcaccaccagcagcagcaggcagccggagggagtgagagtcaccccgtgccgcccacagcccctctcacccccttactccacggggagggcgcctcacagc

SEQ ID NO: 7843 - DNA, 121 bp, synthetic construct
  misc_feature 1..121: note = Description of artificial sequence: synthetic polynucleotide sequence
  source 1..121: mol_type = other DNA
agcccagctcccggccagccctgctactcacctgagccatcctccttgcgttctctgggtccccggggctcccgggccagctctgagatccggaatgacagctctgaaaattcatctgttg

SEQ ID NO: 7844 - DNA, 121 bp, synthetic construct
  misc_feature 1..121: note = Description of artificial sequence: synthetic polynucleotide sequence
  source 1..121: mol_type = other DNA
cgcccccaaccctgccccacgggcccggcgccatgagtgagctggagcaactgagacaggaggccgagcagctccggaaccagatccgggtgagggcctggtgcggggcgggcgattcatg

SEQ ID NO: 7845 - DNA, 121 bp, synthetic construct
  misc_feature 1..121: note = Description of artificial sequence: synthetic polynucleotide sequence
  source 1..121: mol_type = other DNA
tgtcttctctcgcgtctctctggctctgccatcccttacaggatgcccgaaaagcatgtggggactcaacactgacccaggtgagggcacttggtggccagagcgtaactaggggttgaag

SEQ ID NO: 7846 - DNA, 121 bp, synthetic construct
  misc_feature 1..121: note = Description of artificial sequence: synthetic polynucleotide sequence
  source 1..121: mol_type = other DNA
cctccagatcacagctgggctggacccagtggggagaatccagatgaggacccggaggaccctccgtgggcacctggcaaagatctatgccatgcactgggggaccgactcaaggtgtgtg

SEQ ID NO: 7847 - DNA, 121 bp, synthetic construct
  misc_feature 1..121: note = Description of artificial sequence: synthetic polynucleotide sequence
  source 1..121: mol_type = other DNA
tctgctctccctacaccgttccccaccaggctgctggtcagcgcctcccaggatgggaagctcatcatctgggacagctacaccaccaacaaggtagggtggcgcgggctgcggggtgggg

SEQ ID NO: 7848 - DNA, 164 bp, synthetic construct
  misc_feature 1..164: note = Description of artificial sequence: synthetic polynucleotide sequence
  source 1..164: mol_type = other DNA
ggtccacgccatcccgctgcgctcctcctgggtaatgacctgtgcctacgcgccctcagggaactttgtggcctgtggggggttggacaacatctgctccatctacagcctcaagacccgcgagggcaacgtcagggtcagccgggagctgcctggccacactg

SEQ ID NO: 7849 - DNA, 121 bp, synthetic construct
  misc_feature 1..121: note = Description of artificial sequence: synthetic polynucleotide sequence
  source 1..121: mol_type = other DNA
gacctggctgaccagctccttccccagggtacctgtcgtgttgccgcttcctggatgacaaccaaatcatcaccagctctggggataccacctggtgaggctctgccagggctgggcagtc

SEQ ID NO: 7850 - DNA, 203 bp, synthetic construct
  misc_feature 1..203: note = Description of artificial sequence: synthetic polynucleotide sequence
  source 1..203: mol_type = other DNA
gtgccctgtgggacattgagacaggccagcagacagtgggttttgctggacacagtggggatgtgatgtccctgtccctggcccccgatggccgcacgtttgtgtcaggcgcctgtgatgcctctatcaagctgtgggacgtgcgggattccatgtgccgacagaccttcatcggccatgaatccgacatcaatgcagtggct

SEQ ID NO: 7851 - DNA, 218 bp, synthetic construct
  misc_feature 1..218: note = Description of artificial sequence: synthetic polynucleotide sequence
  source 1..218: mol_type = other DNA
gttcttccccaacggctacgccttcaccaccggctctgacgacgccacgtgccgcctcttcgacctgcgggccgatcaggagctcctcatgtactcccatgacaacatcatctgtggcatcacctctgttgccttctcgcgcagcggacggctgctgctcgctggctacgacgacttcaactgcaacatctgggatgccatgaagggcgaccgtgcag

SEQ ID NO: 7852 - DNA, 121 bp, synthetic construct
  misc_feature 1..121: note = Description of artificial sequence: synthetic polynucleotide sequence
  source 1..121: mol_type = other DNA
ttcacaggagtcctcgctggccacgacaaccgcgtgagctgcctcggggtcaccgacgatggcatggctgtggccacgggctcctgggactccttcctcaagatctggaactaatggcccc

SEQ ID NO: 7853 - DNA, 121 bp, synthetic construct
  misc_feature 1..121: note = Description of artificial sequence: synthetic polynucleotide sequence
  source 1..121: mol_type = other DNA
tccccagcaccgaaaaaccactctcccccgccaggtctgcggcatgtgtgggaacttcaatgatgaggaagaggacgaactaatgatgcccagcgatgaagtagcaaatagtgacagtgaa

SEQ ID NO: 7854 - DNA, 121 bp, synthetic construct
  misc_feature 1..121: note = Description of artificial sequence: synthetic polynucleotide sequence
  source 1..121: mol_type = other DNA
ctacctcacacagtactcccggcttcacttcttcaatcaccaccactgagaccacctcagagagtactcccagcctcagttcttcaaccatctactccacagtcagcacatccacaactgc

SEQ ID NO: 7855 - DNA, 121 bp, synthetic construct
  misc_feature 1..121: note = Description of artificial sequence: synthetic polynucleotide sequence
  source 1..121: mol_type = other DNA
cagagccggagggaggatgagccgaagactgagagacagggtggagtccagccccaggctggagatggagcccagaccccaaaagaggaaaaagcccagacaacccgagaagagggagccc

SEQ ID NO: 7856 - DNA, 121 bp, synthetic construct
  misc_feature 1..121: note = Description of artificial sequence: synthetic polynucleotide sequence
  source 1..121: mol_type = other DNA
ggaagtggctccagttgcccctccatgctcaacttagcctctccccgccctcccaggtgtgcgagctggacatcatcttcaactttgagaaggcctacttcatcctggatgagtttttgat

SEQ ID NO: 7857 - DNA, 121 bp, synthetic construct
  misc_feature 1..121: note = Description of artificial sequence: synthetic polynucleotide sequence
  source 1..121: mol_type = other DNA
gatgtccaggacacctccaagaagagtgtgctgaaagccatcgagcaggctgacctactgcaagaggtacgggccagggacagtgaggaggaggaggaagcgcacagtggcggacagggtc

SEQ ID NO: 7858 - DNA, 121 bp, synthetic construct
  misc_feature 1..121: note = Description of artificial sequence: synthetic polynucleotide sequence
  source 1..121: mol_type = other DNA
tatttgccaaagctgctgtcgccttcttggtccgaggtggcgacgggcatcacggacactggagcctggtagggccgccgggcgctgcggggagggcccggggtcagagcgggggcgcggc

SEQ ID NO: 7859 - DNA, 121 bp, synthetic construct
  misc_feature 1..121: note = Description of artificial sequence: synthetic polynucleotide sequence
  source 1..121: mol_type = other DNA
aagctggccctgctcctgccctgggcgtgttgctgcctctgcgggtcggcgctggccaccggcttcctctatcccttctcggccgcagctctgcagcagcacggctaccccgagcccggcg

SEQ ID NO: 7860 - DNA, 121 bp, synthetic construct
  misc_feature 1..121: note = Description of artificial sequence: synthetic polynucleotide sequence
  source 1..121: mol_type = other DNA
gaggaggttctggccaggatgctgccctgagagccaacctcaagatgaagaggggtggcgcccaacccgatggggtccttgctgccctgcttgggcccgaccctggacagaagagcgtgga

SEQ ID NO: 7861 - DNA, 121 bp, synthetic construct
  misc_feature 1..121: note = Description of artificial sequence: synthetic polynucleotide sequence
  source 1..121: mol_type = other DNA
accctggacacacagatgaacaatccatttcctggcctggaaagctcataactccaaaggtaagacagctgttgacaattctaaaccgtttttatttacaacacttctaacaccaaaccca

SEQ ID NO: 7862 - DNA, 121 bp, synthetic construct
  misc_feature 1..121: note = Description of artificial sequence: synthetic polynucleotide sequence
  source 1..121: mol_type = other DNA
ggcaccatctgcctgtggagctggaggcagacgtgggggggccggggcagccagtccacggtggcagtggtggtcctggcgcggctgcaatggtcgtccaccgagttggcctacttctcgc

SEQ ID NO: 7863 - DNA, 121 bp, synthetic construct
  misc_feature 1..121: note = Description of artificial sequence: synthetic polynucleotide sequence
  source 1..121: mol_type = other DNA
acacaaccagagatatccaaaatgtgcaggtaatggcattttgccgataacatctccattgctgagtcagtaatctgaacacagagccaaagtaagtactggttattcaaacactatctca

SEQ ID NO: 7864 - DNA, 121 bp, synthetic construct
  misc_feature 1..121: note = Description of artificial sequence: synthetic polynucleotide sequence
  source 1..121: mol_type = other DNA
caggtaaacccacgaggccatgccccctctgcggaggaccccactggaagttggactgtgagcggcccctgcaaggaccacccccatcccttcctgagccaatcaaaccctcctactcgga

SEQ ID NO: 7865 - DNA, 121 bp, synthetic construct
  misc_feature 1..121: note = Description of artificial sequence: synthetic polynucleotide sequence
  source 1..121: mol_type = other DNA
tgtgcacggggaacgacgaaatcgctttggacccatgtactgcgatggtgaagcacgagagctaaagatgggatccgtgagaaatatgagctcatccatttccaccattaccgtggcatgt

SEQ ID NO: 7866 - DNA, 121 bp, synthetic construct
  misc_feature 1..121: note = Description of artificial sequence: synthetic polynucleotide sequence
  source 1..121: mol_type = other DNA
tagggtttattgtaaactatattgctgctagatacatgtgaaaatattttctttcaatttaggtgtttcccatgatgaattgcttgacttagcaaagtttcatttcggtgactctttatgc

SEQ ID NO: 7867 - DNA, 121 bp, synthetic construct
  misc_feature 1..121: note = Description of artificial sequence: synthetic polynucleotide sequence
  source 1..121: mol_type = other DNA
ctttttgattcttcatgggtatcgcctaagtgaccttcgtcttctgttgtagaaatgtctgagcccatgttgtcgtgaaaaattcatcatgtaattttgtttgcgagtgctgttaaaatca

SEQ ID NO: 7868 - DNA, 121 bp, synthetic construct
  misc_feature 1..121: note = Description of artificial sequence: synthetic polynucleotide sequence
  source 1..121: mol_type = other DNA
aaggaaaaagagcatgtaagtcccatcattgaacgtgcaatctattctaggtcctaagttactctgatatttgtttgaaaattttcagggttaataggtcatgctcacattaccacccagg

SEQ ID NO: 7869 - DNA, 121 bp, synthetic construct
  misc_feature 1..121: note = Description of artificial sequence: synthetic polynucleotide sequence
  source 1..121: mol_type = other DNA
tagatactcacaggacgacctccacatggtccaaagcccattgatcatgacctgttccattgtggcgtggttgccaccagcgcagtaagactcctttcatccgtgcctccctgggtcacac

SEQ ID NO: 7870 - DNA, 199 bp, synthetic construct
  misc_feature 1..199: note = Description of artificial sequence: synthetic polynucleotide sequence
  source 1..199: mol_type = other DNA
cagggggacattgtaagacactctctgagcttgtgtgaagtcctttggctggtgctgggcgatgacatgccaggtgatcccgttgttgacgctgtattgcagcagcactgccttgtccacagcgtgggggccactcaggtcactgttgcagctgtccgtctgcgacatgctcccaatttgcaaaacaaacatgattttg

SEQ ID NO: 7871 - DNA, 221 bp, synthetic construct
  misc_feature 1..221: note = Description of artificial sequence: synthetic polynucleotide sequence
  source 1..221: mol_type = other DNA
ccttgctcgagtgagatccagaggcttggtagctgcttgcctgatctgacagccattaaagtacagtgagtctccatgggcgtagggggccagctgcccacagccacttcctatgactccaccttgaatggtctcccagtttgcctcggtgactcttgcggactcaaaattatctttaatataactgggaaggtcgtgactgaaaacagagcagtcatcac

SEQ ID NO: 7872 - DNA, 159 bp, synthetic construct
  misc_feature 1..159: note = Description of artificial sequence: synthetic polynucleotide sequence
  source 1..159: mol_type = other DNA
ccttggaagctctcgtcgcagatgcagatggcaccggtcgtgcagtatccgtgcccgctgcagagcttggggcaagcctctccaatgtacacgtggtcaattgcccagctttgcttctcagtttcttctcccttctggatccagcggaactgtgttgca

SEQ ID NO: 7873 - DNA, 163 bp, synthetic construct
  misc_feature 1..163: note = Description of artificial sequence: synthetic polynucleotide sequence
  source 1..163: mol_type = other DNA
cctagaggagacatggtcaggcagctggatggtgattcttttccagcttgagctgttgacagagttgtagatggtggcttcatggaactggaaaggggagcagccaatgctgttagaagaggaaggaaggcactgggtctgtacgagctgccaggaatccgat

SEQ ID NO: 7874 - DNA, 121 bp, synthetic construct
  misc_feature 1..121: note = Description of artificial sequence: synthetic polynucleotide sequence
  source 1..121: mol_type = other DNA
aatgttaaaaattatttcacaaaccttgcatccttagtgtattccagcattacggaatgaaggtcaccacaagaagtggcttcacaacccaccacaatctaaaacaaacataaacaatcaa

SEQ ID NO: 7875 - DNA, 177 bp, synthetic construct
  misc_feature 1..177: note = Description of artificial sequence: synthetic polynucleotide sequence
  source 1..177: mol_type = other DNA
ctttaaactgcatcatgtatcctggctgtataatgagttctcgggaggagagagcattgtgagtcttgtccttctttttatttggccaatagaggtgaaaggatggattgccacaaaatcctgctgtccttacagcattagggtaaaaactccagttttcttcatgggaagtgcctt

SEQ ID NO: 7876 - DNA, 121 bp, synthetic construct
  misc_feature 1..121: note = Description of artificial sequence: synthetic polynucleotide sequence
  source 1..121: mol_type = other DNA
ccatcatcaaaagtgtccaccaattggctgggattgatttctgctccaccaatcaaaatgttgtccagtgcccactgagcacgctccaccccagagaccacaattccattgctgatcacaa

SEQ ID NO: 7877 - DNA, 121 bp, synthetic construct
  misc_feature 1..121: note = Description of artificial sequence: synthetic polynucleotide sequence
  source 1..121: mol_type = other DNA
ggctgccaccagcgaagtcgagttgtgttggtgagggcatcttcaggaagaagtatgtagtcgtgtctaacagaaatgtatttctggtaatccatctcatggagcaaagtccaggtaattc

SEQ ID NO: 7878 - DNA, 121 bp, synthetic construct
  misc_feature 1..121: note = Description of artificial sequence: synthetic polynucleotide sequence
  source 1..121: mol_type = other DNA
cacatgcctccatcggtagagtagtccaacagcacgccttccttccggcagatgggacgatggcaagaggtcatgttgttctcactaccgatgcgcccccagtattgcaggaacctgaatg

SEQ ID NO: 7879 - DNA, 177 bp, synthetic construct
  misc_feature 1..177: note = Description of artificial sequence: synthetic polynucleotide sequence
  source 1..177: mol_type = other DNA
ctttgcacctcgaagatccaaatcttgtgtaaccgcttgtctcacagtggatcccccaaaatagagtgcagtgtcctcggcaagaattccacactcagtgcaagtacttccaccttctaaggacatccataagtcaggtttgatttcttcactgtcaaagcgttccttcaggaaagt

SEQ ID NO: 7880 - DNA, 179 bp, synthetic construct
  misc_feature 1..179: note = Description of artificial sequence: synthetic polynucleotide sequence
  source 1..179: mol_type = other DNA
ccttcagagtgtgggtcaagtagcagtttggccctgagtatcccggatcacagatgcactgttcccttaagcaatctccatggcccctgcagttgtccaagcatccagggcccaggtagaaattatcgattgcccactgcatgtctgagtacttctgatagaacctaaaccttaccgga

SEQ ID NO: 7881 - DNA, 216 bp, synthetic construct
  misc_feature 1..216: note = Description of artificial sequence: synthetic polynucleotide sequence
  source 1..216: mol_type = other DNA
ctttcccactaagctttcaggaagtgggtaggtgatccttttccaccctttagttggaaagaatacagatggctgagaaacacttccagagcattttgggtcagcaggcaagcactgagggaccagataattccaactcacaccgaagtcagtagaatactgcacatgaatttgattctgggcaattttttcagacaccttacatccaactgagat

SEQ ID NO: 7882 - DNA, 156 bp, synthetic construct
  misc_feature 1..156: note = Description of artificial sequence: synthetic polynucleotide sequence
  source 1..156: mol_type = other DNA
ccttgaattgcataatccagccttcagtgggagtcaggtcatgggtcactgcatacacctcccgtccatcatgactgccacagagcatcacaccatcaggggagtcacagaatctttctactgtacaatcatcatggaatagccagtgctcattca

SEQ ID NO: 7883 - DNA, 258 bp, synthetic construct
  misc_feature 1..258: note = Description of artificial sequence: synthetic polynucleotide sequence
  source 1..258: mol_type = other DNA
cctgaagttttgtcttccataaacatgtcaaaggcgatcctcccgacagggccggcatctgcaggggagcgctcatgctggggtactggggcgctgctgaaggtgtccagcataacggtcctttggtcagcagagcctgagatgaggacattgtcaatggcccagtcgttctgatccaggccgtcatgtcttggctgccaccagcggaagcgagtggcaatctctttagcatcaggagggagaaggatattcacaaat

SEQ ID NO: 7884 - DNA, 195 bp, synthetic construct
  misc_feature 1..195: note = Description of artificial sequence: synthetic polynucleotide sequence
  source 1..195: mol_type = other DNA
cccgggcttactgtactggtcatagaaaatctccatgagcaggttccaggtaatgcctccattgacagaatattccaagagaacaccttggttacggttgtttggtgtaatcaggcacccatacatgaagtaaaattggatgaactcagcattagtgaggtttagatccacagtgactaataatcgactacaacc

SEQ ID NO: 7885 - DNA, 179 bp, synthetic construct
  misc_feature 1..179: note = Description of artificial sequence: synthetic polynucleotide sequence
  source 1..179: mol_type = other DNA
ccccactgaaatggagagccattcccgacgccacggctccacacactgtactcaatttccctccgttcacagtcagccagttctgactggatggagctcgattgaagttgtctttgagttgggttggaagagaggtctcggggtcatcacagtacaggccaccccactgttcatcacag

SEQ ID NO: 7886 - DNA, 142 bp, synthetic construct
  misc_feature 1..142: note = Description of artificial sequence: synthetic polynucleotide sequence
  source 1..142: mol_type = other DNA
cacgcagtttccctggatgcatctcccatggccactgcacatgtctatgcagccatccccgatatagacattatctattgcccatgtctgctgcttgtcaaaaggagctggttgatgccaacggaaacgagtggcttgggac

SEQ ID NO: 7887 - DNA, 170 bp, synthetic construct
  misc_feature 1..170: note = Description of artificial sequence: synthetic polynucleotide sequence
  source 1..170: mol_type = other DNA
cctggtataaggagggagaggcagagtgattctagtccacttgttgaaagtgtctgacaccaggatccgttgcagatgatagcgactgcattccacattggtaggcagacagtcccttaccaatgggtgccatgacaatccaagatctactgagtattccaattcaatcg

SEQ ID NO: 7888 - DNA, 121 bp, synthetic construct
  misc_feature 1..121: note = Description of artificial sequence: synthetic polynucleotide sequence
  source 1..121: mol_type = other DNA
ccataacaagagtctgtgactgagcaggaggcagcgaagtctatctgtaggaaggaatcctcattcacggcaacgtctgtgctgaccacgtaacgggtgctggccttttcaatgaagacca

SEQ ID NO: 7889 - DNA, 121 bp, synthetic construct
  misc_feature 1..121: note = Description of artificial sequence: synthetic polynucleotide sequence
  source 1..121: mol_type = other DNA
cagtagagccacacacgggcatcttggtgcctcctgggtgaagcagccatttcctactatcaagggttgtgaaatcatcttccaagaccgtattaccagaaatatttcctccaataagaat

SEQ ID NO: 7890 - DNA, 260 bp, synthetic construct
  misc_feature 1..260: note = Description of artificial sequence: synthetic polynucleotide sequence
  source 1..260: mol_type = other DNA
cctgatcgataacccaggggctgtagaagtgcccattctcagacggttgccaccagcgaaggcgagtagaaccagaacgggctttcaagggtatctccagggcaatgtacctgcccacattgctggaattgctgaaaaggaactcctgaagaagactccacgagaggccaccgttgagagaatactgtaggagcacgggttgactcctggggtcaggaacgcctttaccacatcccagtctcatgaagaactgcacaaat

SEQ ID NO: 7891 - DNA, 149 bp, synthetic construct
  misc_feature 1..149: note = Description of artificial sequence: synthetic polynucleotide sequence
  source 1..149: mol_type = other DNA
cctagcatgtgataaatccaggtctcgtgtcatcaacatgcgcaagccatcttcattgaaaaagaggttgtttccactagaaaggattccacactttcgagatggtttcccaccactcattaataagaatctatcagattctagctgac

SEQ ID NO: 7892 - DNA, 222 bp, synthetic construct
  misc_feature 1..222: note = Description of artificial sequence: synthetic polynucleotide sequence
  source 1..222: mol_type = other DNA
ccttcgaaatcatctttgagaaaatcaggatttttggtgcttattttacaggttggacctgagtagccagggtcacatatacatttggttccattgatacagctcccctgtccattacacatctcctcacactggggaccgatgtagacattatcaatggcccatgtcactggctgagagccggcagggtaaaatccctggtaccatctgaaacggacagat

SEQ ID NO: 7893 - DNA, 231 bp, synthetic construct
  misc_feature 1..231: note = Description of artificial sequence: synthetic polynucleotide sequence
  source 1..231: mol_type = other DNA
cccacaaaggtgcagcttcccaaagtgcacgacctccctcctccagccctgcatggttcctgcgtagtaggtgctgctggggtggtgctcggtggagcataaagagctgacgtggctgctgctgtggtagcagaggggcagcagaaggtgccaggtcgccccgaagtcccttgaaaattccagtctcactggatccgcggatgagctatcagtcgaacagccaacgttgat

SEQ ID NO: 7894 - DNA, 121 bp, synthetic construct
  misc_feature 1..121: note = Description of artificial sequence: synthetic polynucleotide sequence
  source 1..121: mol_type = other DNA
gtcaagtacctcaaattgtatgatggtgttctcattcacatttaggtcacgggtggtaatggaatgctcaccaacttcatttgaaacaaacaccatagctgaatcttcttcactgttacac

SEQ ID NO: 7895 - DNA, 173 bp, synthetic construct
  misc_feature 1..173: note = Description of artificial sequence: synthetic polynucleotide sequence
  source 1..173: mol_type = other DNA
cggtgccccctttgaagaatatggacaataaagaccgatgttaccaccaggatagaaaaaccaattgtcttctctgggcccaaaatcaaatgtatccaagagcatcacagggttgtttacattatttccatcgataatgaagtcatcaacaatccagatttcttctttcttac

SEQ ID NO: 7896 - DNA, 184 bp, synthetic construct
  misc_feature 1..184: note = Description of artificial sequence: synthetic polynucleotide sequence
  source 1..184: mol_type = other DNA
ccgttattataaggttgccagagtctgaatcttgtagcattggtttgggcagtgtatggcaagggaacattgatgaaaagtatattcgttgtttgaggaaagtaaaattcatccatcaggtgccaagtgattcctccactgatggagaattgtaacagaatagagtgagatctctctggggtac

SEQ ID NO: 7897 - DNA, 121 bp, synthetic construct
  misc_feature 1..121: note = Description of artificial sequence: synthetic polynucleotide sequence
  source 1..121: mol_type = other DNA
taataaattcatacttactttttgctataaatctaagtgaaaactggacatacattgtatttgtacaatctagatctcttgaaataagcatccttagtccttcctgaaaataaaaacatat

SEQ ID NO: 7898 - DNA, 179 bp, synthetic construct
  misc_feature 1..179: note = Description of artificial sequence: synthetic polynucleotide sequence
  source 1..179: mol_type = other DNA
cccctttaaaaattagagatgttccagatttgatggtttcaccattcagattccccctctctgcaccatacacttcaggccaaaggtcaggatgtaaattcccattgaaatcgtctttaagaatcgagggcagaggaacaacaggaacacaatagggtccaccaaagccccggtcacac

SEQ ID NO: 7899 - DNA, 142 bp, synthetic construct
  misc_feature 1..142: note = Description of artificial sequence: synthetic polynucleotide sequence
  source 1..142: mol_type = other DNA
cacacagcgtccagcatcacaaatccctcgtcctgagcacatccaagggcaccctgaggccagtacaacattatcaatcgcccaggaatcagcccccacagtgtagttggcctgaatccatctgaaccgggtcctgggagaa

SEQ ID NO: 7900 - DNA, 275 bp, synthetic construct
  misc_feature 1..275: note = Description of artificial sequence: synthetic polynucleotide sequence
  source 1..275: mol_type = other DNA
catggtggagagtggaaggtagacagtgatccgcttccaattctggaatctttccgaggtgtaaattgaactttccgtgtaatgcagacagccaatggttggaggaacacactcttcggtgacaagatgccagtccttgccattgttcagagaatactggagctgtacactgtgggagttgctgaagggcttgctacagcccatgctcatttcaaactgcaaaaaggtagatgctgacacatgaaaatcccaggtctcagcataacgaggttttc

SEQ ID NO: 7901 - DNA, 190 bp, synthetic construct
  misc_feature 1..190: note = Description of artificial sequence: synthetic polynucleotide sequence
  source 1..190: mol_type = other DNA
cctatgttttcagtgaatatcagagcagtatccatagagagacagtcaatatcaacttgacctccttggattcgataccagttggcttgcaaatctatagagccatcaaatttgtcttgaaatccagtttgagagctgtcattcattcctataagaacatcatccaaagcccactgggctgaatgcttcc

SEQ ID NO: 7902 - DNA, 160 bp, synthetic construct
  misc_feature 1..160: note = Description of artificial sequence: synthetic polynucleotide sequence
  source 1..160: mol_type = other DNA
ccatgttgcggttgccaccatcgaaatgccgttgcaggtgtcttcgcgtcctgtggcaggtcaatggaaatgatctgtggttccaggaaggacatgaagtccaactctcgaagcaaatgccagagtatcccattgtcatttgaatactgaacaataagcc

SEQ ID NO: 7903 - DNA, 121 bp, synthetic construct
  misc_feature 1..121: note = Description of artificial sequence: synthetic polynucleotide sequence
  source 1..121: mol_type = other DNA
ccatggaaatacagcagcttaccttcatttctagttcttggtttgatgcaggtaatgcctgaagttttgcttccaatttgtatataaaattgaacaagtctggggaataaaaactttagtt

SEQ ID NO: 7904 - DNA, 209 bp, synthetic construct
  misc_feature 1..209: note = Description of artificial sequence: synthetic polynucleotide sequence
  source 1..209: mol_type = other DNA
cctgatattcctggtgtccagagggaccgtccgggcttcccttttcccagggccattgaagtagagagatttgccatcgttaagtgttccacagccagttccaacctgggcacctgttatcttgtaccacagagggctgagcttcccctcaaacctatcgaacatctcattgtgattggggacatttgacacacaggttccttgtgcag

SEQ ID NO: 7905 - DNA, 159 bp, synthetic construct
  misc_feature 1..159: note = Description of artificial sequence: synthetic polynucleotide sequence
  source 1..159: mol_type = other DNA
ccagtatatcccaggtcacagaaacacactcctgaaatgcagtccccatggccactgcagtaactgggacaaggctcggatatgtacactccatctaaaccaaatggaggcacgtttttctgtgagctgctctcctggatccatcggaatctggtcttg

SEQ ID NO: 7906 - DNA, 234 bp, synthetic construct
  misc_feature 1..234: note = Description of artificial sequence: synthetic polynucleotide sequence
  source 1..234: mol_type = other DNA
cctggatgcaagagaccttggaataacaatggtgattcttgtccattcttcaaagtcccctgtgtgatacatggtgggctcacttagttctctggagtttccttcgcatcctttgcctgcagaagccgggtaacagccttctttcaccagaaaccaggacataccagcatcatgagagtactgaagaagaactggagcagtactgctgaattgattggcacaacctatgtttag

SEQ ID NO: 7907 - DNA, 202 bp, synthetic construct
  misc_feature 1..202: note = Description of artificial sequence: synthetic polynucleotide sequence
  source 1..202: mol_type = other DNA
ccttgaactgtagcacatatccaggtttcagggtcaaatctcgagttactgcaaatcgatctccatctgattttccaaatatcattgctgatggtgtggcagcacagaaggtttcatttttaaccattccttcattagccaacatcaaccacacactcatctgattcatagggtaatcaaaagctggcttctcataaaagtt

SEQ ID NO: 7908 - DNA, 173 bp, synthetic construct
  misc_feature 1..173: note = Description of artificial sequence: synthetic polynucleotide sequence
  source 1..173: mol_type = other DNA
cctgaggtaaagttggattgataactgggatgatctgcttctgcttctcggacagaatgatgatgtcatcgactgcccactggtcatagtcctcccctgagaacacgggctgccaccagcggaacctggtgcaaggggtcttggcagcagctggaagctccagatagacaaat

SEQ ID NO: 7909 - DNA, 207 bp, synthetic construct
  misc_feature 1..207: note = Description of artificial sequence: synthetic polynucleotide sequence
  source 1..207: mol_type = other DNA
cctgggtttgctgaagtctgaaaagtacatctctgctagcaggtgccactggatgcccccattgttgctgtactgaaggaggacgccctcctctctgctgtcaggcttgttgcatgaagcactctctccgcctatctggatgtagaactggacaaagtccacccaagaagtatccaggtcccaactcaccagctgtcttttcccagc

SEQ ID NO: 7910 - DNA, 188 bp, synthetic construct
  misc_feature 1..188: note = Description of artificial sequence: synthetic polynucleotide sequence
  source 1..188: mol_type = other DNA
ccttgctgaagtacagagatgatccagaagagatgacaccacacccttgttctggttttacaatttctcccccaataacttcttgccagtcagactcccagccattctggttctcaaaatctgacataattgtggacggaagggcagcttctgggtggcattcagtgccttggtacccctggtcacac

SEQ ID NO: 7911 - DNA, 139 bp, synthetic construct
  misc_feature 1..139: note = Description of artificial sequence: synthetic polynucleotide sequence
  source 1..139: mol_type = other DNA
cctgcatatgccatgatcgcatgagccatgcccactgcacatgttggggcactgctgcccaatgtaaatgctgtccaaagcccactcgtcttgagctgtgtaatagctctggctccagcggaaacgggtagcactggac

SEQ ID NO: 7912 - DNA, 121 bp, synthetic construct
  misc_feature 1..121: note = Description of artificial sequence: synthetic polynucleotide sequence
  source 1..121: mol_type = other DNA
tcaccaagttttctggggaagaagcactatgactctcctccactgtgtaaactcactggcatggtaaatacttgctgatgtaaattcctgacaacttggcatacttggaaggcattcctga

SEQ ID NO: 7913 - DNA, 194 bp, synthetic construct
  misc_feature 1..194: note = Description of artificial sequence: synthetic polynucleotide sequence
  source 1..194: mol_type = other DNA
cttcttggacgaggtgccaggtaaggccgtggttggttgagtactccagcttcacctggttgtccatgtgtggggtgtatttctggccacatcccatcaccaaactgaactgaatcatataggatgctcctatctgcattgattgtgtttccacatagcgcatacttgaggcaagtttagaatctcctgtaaaa

SEQ ID NO: 7914 - DNA, 238 bp, synthetic construct
  misc_feature 1..238: note = Description of artificial sequence: synthetic polynucleotide sequence
  source 1..238: mol_type = other DNA
ccaaagggtccagtcgtggccacagtatggctgaacatttccaaggtagaatcccagagactgagtgacctccacaagattggtaaagtcaagactaatgctgttgaaaagcacagatgtcatgataatctcatcaatagcccatacatcttctctctgggaagaatgatacggttgccaccatctgaactgaattccaaactgctttgcatcacctggtagttctacggagattatt

SEQ ID NO: 7915 - DNA, 163 bp, synthetic construct
  misc_feature 1..163: note = Description of artificial sequence: synthetic polynucleotide sequence
  source 1..163: mol_type = other DNA
cctgggctcatgatagctgagatatgaataatgctccaggagtttccaagttatcccattatcataagaataatgcaacaaaactccttcaccaggctgatcaggggctctgcacgtgctcagaacagatttgctccccagtctcagtgtgaactggagaaac

SEQ ID NO: 7916 - DNA, 235 bp, synthetic construct
  misc_feature 1..235: note = Description of artificial sequence: synthetic polynucleotide sequence
  source 1..235: mol_type = other DNA
cctggattgtgagctgtcaaggaaagatgtaattagctgacgccgcccatctttgttgaaaaccagggccttaccactggccaagacaccacaaccaaagctgacttcagcaccacggatagagtaaaagttatggtaagaggagagcctggaactgccaaagctttcagaaataaacattgggaatgtctgggatgccatctcacaagctgggccagaaaatccagggtcacac

SEQ ID NO: 7917 - DNA, 121 bp, synthetic construct
  misc_feature 1..121: note = Description of artificial sequence: synthetic polynucleotide sequence
  source 1..121: mol_type = other DNA
gcataagtgttattttaagatgcttacttgcaaccatgtctagtgcactgtcctctgccagaacagaatttgagacatgacgggccaatataaactgtgggagggaaaaagagaacataat

SEQ ID NO: 7918 - DNA, 121 bp, synthetic construct
  misc_feature 1..121: note = Description of artificial sequence: synthetic polynucleotide sequence
  source 1..121: mol_type = other DNA
actaaccattatcaattgcccacatgtttccaaggattggtcctgtttgtctccagcgaatcctggtgttccgggttagtgctgcgttaggaaggggaattgttattcggttccacctgca

SEQ ID NO: 7919 - DNA, 121 bp, synthetic construct
  misc_feature 1..121: note = Description of artificial sequence: synthetic polynucleotide sequence
  source 1..121: mol_type = other DNA
tgtagttttcagaggagtagacagtgctgtgggggaggtggggtccagcacagatctcaggtaagcattcagtgtgaaggagggaccaggagcgcccatggttggtagaaaattccaagct

SEQ ID NO: 7920 - DNA, 210 bp, synthetic construct
  misc_feature 1..210: note = Description of artificial sequence: synthetic polynucleotide sequence
  source 1..210: mol_type = other DNA
cctgttaccaggctgatgcgttccacatcccagattgatggaaaactgtatcatgtgagacattgtagaagggagaacaggcaagacatggaaaaagtctacagcccagacattcctattatgtccttgatggttcttttgcctgagacaaaatttggtagcaggagtctgaagttcaggattgatgaccacagaaaccaaagacggaac

SEQ ID NO: 7921 - DNA, 121 bp, synthetic construct
  misc_feature 1..121: note = Description of artificial sequence: synthetic polynucleotide sequence
  source 1..121: mol_type = other DNA
gtaccttatatgaggaataggaaagggtatccagtgttatatgctcttttcttccttcaatttttgcatacaggattatgtcattttcatgagaatttccagggtcacaaattcctcctgc

SEQ ID NO: 7922 - DNA, 153 bp, synthetic construct
  misc_feature 1..153: note = Description of artificial sequence: synthetic polynucleotide sequence
  source 1..153: mol_type = other DNA
cccatcacaaagtaaaacctcaggttcccataaccggtagtgtccatggatggagtgcataatttcctctctccatctttgaggaagaccattgataagcctgattctatcgttccacattctgtaccaatgacagctcccaagacatcccat

SEQ ID NO: 7923 - DNA, 147 bp, synthetic construct
  misc_feature 1..147: note = Description of artificial sequence: synthetic polynucleotide sequence
  source 1..147: mol_type = other DNA
ccctgtaggctggctctcaaattcttctgaccattgctcttgaatatcttctgtggaaagatctacatccctggtggtggcaaaattgaactcgctgccttcatttccatggaaataaatggagttcccatctgactgacagctatg

SEQ ID NO: 7924 - DNA, 121 bp, synthetic construct
  misc_feature 1..121: note = Description of artificial sequence: synthetic polynucleotide sequence
  source 1..121: mol_type = other DNA
ccttaactgtagctcctgggaagaaaagccagttgcctgtgtccactgggtcgagactatcttctaaaacgacttgtctgtgagctgaattgatgatcaagatgttatctaaggcccagca

SEQ ID NO: 7925 - DNA, 121 bp, synthetic construct
  misc_feature 1..121: note = Description of artificial sequence: synthetic polynucleotide sequence
  source 1..121: mol_type = other DNA
ggcttcatacacttcacctacacgaagattttcctgcttccactgaaattggacattctcccctttggcgtcctcaggaaggtagaggatatggatgattgtgctgacattggaaggggct

SEQ ID NO: 7926 - DNA, 121 bp, synthetic construct
  misc_feature 1..121: note = Description of artificial sequence: synthetic polynucleotide sequence
  source 1..121: mol_type = other DNA
attacaacaaacctaattttctctagctgaatccagtccgcagagttattcttggcatataacacgatgatgctggggtctgaataactaaagcgacatgaacctgaccctgtaaatagca

SEQ ID NO: 7927 - DNA, 121 bp, synthetic construct
  misc_feature 1..121: note = Description of artificial sequence: synthetic polynucleotide sequence
  source 1..121: mol_type = other DNA
aaattaaatcgttataactgctaaaaaacacttaccaatggaaaattggaggacagaagctgttgttgtattaaggcctgtggtaatctaaagaaaaaagaatacataaaaataagacaag

SEQ ID NO: 7928 - DNA, 121 bp, synthetic construct
  misc_feature 1..121: note = Description of artificial sequence: synthetic polynucleotide sequence
  source 1..121: mol_type = other DNA
gcacatacttaccagttctcgtgggccatatggttcacagaaggtgacggcattgccatgcataatcgcgccacactgttctccagtctcacagttgttacattcaaccctgcaggaaaac

SEQ ID NO: 7929 - DNA, 121 bp, synthetic construct
  misc_feature 1..121: note = Description of artificial sequence: synthetic polynucleotide sequence
  source 1..121: mol_type = other DNA
gaatgttcctgtaacttaccatatatttggatttaattgcagttggtggtaggagtcaaagtcatctctcaggataatgctgtcactatgtatttcagctaaaagaaaaaggaagtattta

SEQ ID NO: 7930 - DNA, 121 bp, synthetic construct
  misc_feature 1..121: note = Description of artificial sequence: synthetic polynucleotide sequence
  source 1..121: mol_type = other DNA
gatcaagtactaaagttaatgacatcagagtcttaaacacttacctagatgtgggtgcacagtgacatctgttggagctgaatcaagagaggaaagaagaaagacaactgatcaggaatga

SEQ ID NO: 7931 - DNA, 121 bp, synthetic construct
  misc_feature 1..121: note = Description of artificial sequence: synthetic polynucleotide sequence
  source 1..121: mol_type = other DNA
caaacaaatcaaatgtgacgcttacctccttgttcacacaactgctgggctaaagcatctttgaaaataacctggccccggtgtgttgctgtagccctggaaacaaataggaaaaggttaa

SEQ ID NO: 7932 - DNA, 137 bp, synthetic construct
  misc_feature 1..137: note = Description of artificial sequence: synthetic polynucleotide sequence
  source 1..137: mol_type = other DNA
catgaaattcacacagcctgtgcccgcaggtggagcaatccagatgaaactgaggttggttgtgggcaggtgactcacgtgagaggctaccacactgcacataaactggttaccaaactggtggtcagacatgatcc

SEQ ID NO: 7933 - DNA, 121 bp, synthetic construct
  misc_feature 1..121: note = Description of artificial sequence: synthetic polynucleotide sequence
  source 1..121: mol_type = other DNA
cttaccaaatccgaaagcactggaacctccaatgctctgtgatgcctgaacacttgtagatgtgtatagtcctgtcaccagcaagccgtcaaaaaaggtgcttgttgaaattgtcactgaa

SEQ ID NO: 7934 - DNA, 121 bp, synthetic construct
  misc_feature 1..121: note = Description of artificial sequence: synthetic polynucleotide sequence
  source 1..121: mol_type = other DNA
tttgggcatttcacatcaggtttgcataaattaaaacatacaattcaagccacgcaacacggttgatgtctgtaatcctggcattttgggaggcctgggtgggcagatcacttaagcccag

SEQ ID NO: 7935 - DNA, 227 bp, synthetic construct
  misc_feature 1..227: note = Description of artificial sequence: synthetic polynucleotide sequence
  source 1..227: mol_type = other DNA
ccatggtattcttgtcccggaacgtagtaggtggggttgcccgcaatatgcagggaaatgagcacctcgccctgctccccatccccttccagctccccgtggtgggtgcacaggaaaaagaagggcgaaaagcgggggtaatagccagccgccgcgcgcgccctcagcgtcgcccccagcaacagcgctaggaggaaagtctgccgggcccagccactgcgctccat

SEQ ID NO: 7936 - DNA, 121 bp, synthetic construct
  misc_feature 1..121: note = Description of artificial sequence: synthetic polynucleotide sequence
  source 1..121: mol_type = other DNA
ctgtgtactgttatgtcctttgttctcatctgtgtaggggatgagctgattatttatgttgtaacaataggagttcatgtaccacagtgaggatttttttttccttaatctgagaggcagc

SEQ ID NO: 7937 - DNA, 121 bp, synthetic construct
  misc_feature 1..121: note = Description of artificial sequence: synthetic polynucleotide sequence
  source 1..121: mol_type = other DNA
tggtgttgccaagccattgctactccactatttattgagtaaggtcagtcctttccatactaggcctttctagggatttggtaatagtgaggggagaacagaacaaggtgtgaaactttcc

SEQ ID NO: 7938 - DNA, 121 bp, synthetic construct
  misc_feature 1..121: note = Description of artificial sequence: synthetic polynucleotide sequence
  source 1..121: mol_type = other DNA
cagacaagctttcagaaggaatattttggccattcccacctcagttttcgtttacatcaaatgtgtctagtgaaaggtaatatgatgaccagctatagtttcaaatttttagaaaataaaa

SEQ ID NO: 7939 - DNA, 121 bp, synthetic construct
  misc_feature 1..121: note = Description of artificial sequence: synthetic polynucleotide sequence
  source 1..121: mol_type = other DNA
catcagcatagtcttctctcctttactctcattttttccccttgttttctcttctattttcctagtgctacagaagttctcactttttgtcaccaggtgctagggggcagagtgcggttca

SEQ ID NO: 7940 - DNA, 121 bp, synthetic construct
  misc_feature 1..121: note = Description of artificial sequence: synthetic polynucleotide sequence
  source 1..121: mol_type = other DNA
tacacacacacacacacacacacacacacatatatatatacatatatatatgaaagagatgtcccactagtatcctattaaaccacagagactagtgggcttcttacattagcttttttat

SEQ ID NO: 7941 - DNA, 121 bp, synthetic construct
  misc_feature 1..121: note = Description of artificial sequence: synthetic polynucleotide sequence
  source 1..121: mol_type = other DNA
tgggagacaaagatcaaagcatggatggatcgatatgaagaagcaaataacaaccagtacagtgagggtgttcagagggaggcacaaagaatagctctgagattaggcaatggaaatgaca

SEQ ID NO: 7942 - DNA, 121 bp, synthetic construct
  misc_feature 1..121: note = Description of artificial sequence: synthetic polynucleotide sequence
  source 1..121: mol_type = other DNA
agtctaacaattcaataaaatacaaatctagagccaagtgaaaacttaaaatctgcaaaggatgaaaaaagtgacaaagttgacagaaaatactaaagaaattctagaaagccaggcaaaa

SEQ ID NO: 7943 - DNA, 121 bp, synthetic construct
  misc_feature 1..121: note = Description of artificial sequence: synthetic polynucleotide sequence
  source 1..121: mol_type = other DNA
cgttgagtaattgttattcttttgttgtaggtgacataaatgttacagttcttattggaagtaaacaagtcagtgaaggtacagataatggtgatctcccttcttatgtgtctgcattcat

SEQ ID NO: 7944 - DNA, 121 bp, synthetic construct
  misc_feature 1..121: note = Description of artificial sequence: synthetic polynucleotide sequence
  source 1..121: mol_type = other DNA
ttttatgattattggtctattcaggtgttccacctctttggggacattttattttgccaggaacttctccatttcctctagattttcaaatgtattgccatagattttcacatacaacgct

SEQ ID NO: 7945 - DNA, 121 bp, synthetic construct
  misc_feature 1..121: note = Description of artificial sequence: synthetic polynucleotide sequence
  source 1..121: mol_type = other DNA
ggaccaaacatatttgatttgcagatttatgtgaaggatgaggttggtgtcacagacctgcaagtcctgactgtccaggtaacagatgtgaacgagccacctcagtttcaaggcaacttgg

SEQ ID NO: 7946 - DNA, 121 bp, synthetic construct
  misc_feature 1..121: note = Description of artificial sequence: synthetic polynucleotide sequence
  source 1..121: mol_type = other DNA
ggagcttcagcatcactctgaacactgaacccttcaagatgcaatggatcaatatctaccaagtcaaatgggaacacaaatgcaaaccatttaacatgccaacagctctatttaaatagca

SEQ ID NO: 7947 - DNA, 121 bp, synthetic construct
  misc_feature 1..121: note = Description of artificial sequence: synthetic polynucleotide sequence
  source 1..121: mol_type = other DNA
ggccttacatagggtgcttggggattgtggtcgttggattaacagctgctggcagtagacagatgcaacttccttccattaacatctgaaaggctagacctgggctcacttgacacaaaca

SEQ ID NO: 7948 - DNA, 121 bp, synthetic construct
  misc_feature 1..121: note = Description of artificial sequence: synthetic polynucleotide sequence
  source 1..121: mol_type = other DNA
cccagagataattattataaactctggaggaaaaaacccacccaccactggaaggcattgtagagcaaccagaaggaggcagagactggaggggagtagaccactgaaagaagaaaacttc

SEQ ID NO: 7949 - DNA, 121 bp, synthetic construct
  misc_feature 1..121: note = Description of artificial sequence: synthetic polynucleotide sequence
  source 1..121: mol_type = other DNA
ttggcagcatttttaaattatttctctaatgtttaagagcatgtcttaaaatggctacttgattgcatcacatctccaactgtcccaactttgagcacccttttggtccattgtgttgggg

SEQ ID NO: 7950 - DNA, 121 bp, synthetic construct
  misc_feature 1..121: note = Description of artificial sequence: synthetic polynucleotide sequence
  source 1..121: mol_type = other DNA
atgaagcatttccggatcaccagaaggatactttctctacatagctcttagatgtcacttgtatagtatattcacttactcaacagacacatattgaatgtctgctatgtgctaggtatct

SEQ ID NO: 7951 - DNA, 121 bp, synthetic construct
  misc_feature 1..121: note = Description of artificial sequence: synthetic polynucleotide sequence
  source 1..121: mol_type = other DNA
cttttgtttgatggaacaattctgtatcctgattattgtggtcgttacatataccatacgtgagactaaattgcaatgaactacacacacacacacattagtgtgtgtacaaaatgattaa

SEQ ID NO: 7952 - DNA, 121 bp, synthetic construct
  misc_feature 1..121: note = Description of artificial sequence: synthetic polynucleotide sequence
  source 1..121: mol_type = other DNA
actcagaacctgcttttgcatttattataaggatgttggtatcacatggtatacattgattggctacttttctatcttagctcattgttcactatatagattggttctttttgtacatgaa

SEQ ID NO: 7953 - DNA, 121 bp, synthetic construct
  misc_feature 1..121: note = Description of artificial sequence: synthetic polynucleotide sequence
  source 1..121: mol_type = other DNA
aaattgcaactgaaaatgtgtgttttgggtaattttaaaaaatcacaggtctgagaaaaagaagatagatcatggtctgaaagcaagggaataaaacacacggtgtattttacaagaacac

SEQ ID NO: 7954 - DNA, 121 bp, synthetic construct
  misc_feature 1..121: note = Description of artificial sequence: synthetic polynucleotide sequence
  source 1..121: mol_type = other DNA
ggactgaggggtggaagcaggagtggcttgtttaccaccgctccccagcacccatttgaggagtttgtgcttcccatcccgacaactctgagctctgtgtgtctaggggtcccggttccaa

SEQ ID NO: 7955 - DNA, 121 bp, synthetic construct
  misc_feature 1..121: note = Description of artificial sequence: synthetic polynucleotide sequence
  source 1..121: mol_type = other DNA
caagttgatccttttgaggttgttttaagaatggtacatagtaatcaccccataaacgggagataatattgttactgctgtcaagaagtagttacagaaaggagaatatgacatttcccct

SEQ ID NO: 7956 - DNA, 121 bp, synthetic construct
  misc_feature 1..121: note = Description of artificial sequence: synthetic polynucleotide sequence
  source 1..121: mol_type = other DNA
cttttatatacattgaacatcccgtcatgattatcaattcctcctgtaacaagtgtgacgtgagctctaaattgaaaaaggtatttttaaactaaaagtcaggaatgagaggagtaaacag

SEQ ID NO: 7957 - DNA, 121 bp, synthetic construct
  misc_feature 1..121: note = Description of artificial sequence: synthetic polynucleotide sequence
  source 1..121: mol_type = other DNA
ttactgactacttgtgacacgtcagacacagttaaccaggcagctaatgcaggcaggtcggcatttgaacaaaggttcaaccgttatattcaactgcctccaacagaaagaaatcaatggc

SEQ ID NO: 7958 - DNA, 121 bp, synthetic construct
  misc_feature 1..121: note = Description of artificial sequence: synthetic polynucleotide sequence
  source 1..121: mol_type = other DNA
aatattagattacatcttctgcaactgtggtgtcaaaaatctgatagcaaatttgattatctgttccatttgtgacattgtatgacttgatgaagcattccaaccacggatatgcatctac

SEQ ID NO: 7959 - DNA, 121 bp, synthetic construct
  misc_feature 1..121: note = Description of artificial sequence: synthetic polynucleotide sequence
  source 1..121: mol_type = other DNA
ttgcctaccaatttttattcctggaggacaaaacatatccatgatcatatccacacttttctgaaggtcatcatccatcagaacttctgatgctggaatctggaagaatttgtccttaaaa

SEQ ID NO: 7960 - DNA, 121 bp, synthetic construct
  misc_feature 1..121: note = Description of artificial sequence: synthetic polynucleotide sequence
  source 1..121: mol_type = other DNA
acctctgatacttacagaatccatgagataggcttctagtactcctgttccatcatcaagtgtaaaggtcataacaaacacatattggaggggtacaatacccagtgctagtgaaggaaaa

SEQ ID NO: 7961 - DNA, 121 bp, synthetic construct
  misc_feature 1..121: note = Description of artificial sequence: synthetic polynucleotide sequence
  source 1..121: mol_type = other DNA
tggaaatttagctaaccttctgccacagaagaaggaatccacgatgttttatcaaccagggaatttagattttgtatggatctcaaactagaacactgtttacatctgaaatttataaaag

SEQ ID NO: 7962 - DNA, 137 bp, synthetic construct
  misc_feature 1..137: note = Description of artificial sequence: synthetic polynucleotide sequence
  source 1..137: mol_type = other DNA
cccatagtgatgtattgttccttgtataagaaatggtgctgaaaggtccaaaagttccaggtcttcgtggccagatctcacaggaattacactattaaacttgttcgagagtttgcaaatttcactgagtgtacctc

SEQ ID NO: 7963 - DNA, 207 bp, synthetic construct
  misc_feature 1..207: note = Description of artificial sequence: synthetic polynucleotide sequence
  source 1..207: mol_type = other DNA
ccttctatcaaaagtagacattcatttgaaagcgggagaataccattatttttcacaaaatgaactgctacttttcgtcctttttgatttttagtggtccagatttttgaatcatataatgatgtattttgtagcttgacatctggggttttagttgcaccatcctgaaaaattatatccaaatcgccctcatgtggaacttcttgc

SEQ ID NO: 7964 - DNA, 158 bp, synthetic construct
  misc_feature 1..158: note = Description of artificial sequence: synthetic polynucleotide sequence
  source 1..158: mol_type = other DNA
cagcaaatgacatttagggcaatgaagtttaacagactgaaatagtcttctgggcttatatgacctcaattttgctcggatgcggtattgttgaggagctttttgtttcaaaatggcacatagtggtgtcctctccaaatactgatgatctgtaagta

SEQ ID NO: 7965 - DNA, 121 bp, synthetic construct
  misc_feature 1..121: note = Description of artificial sequence: synthetic polynucleotide sequence
  source 1..121: mol_type = other DNA
gtgcccatctcaaaaatgatacatagtcttacttgtagcagatagctgttgacatctttctacctcgtataatgatactgatccagagcctataaaaaggaaaaggcaaaaaaattaagtc

SEQ ID NO: 7966 - DNA, 121 bp, synthetic construct
  misc_feature 1..121: note = Description of artificial sequence: synthetic polynucleotide sequence
  source 1..121: mol_type = other DNA
aatgttaaagattatccttacttggaaagctgtcgtcaggttctgattgacagataacatctgaatgctgattggctgtcaaatttgcagattctaaatccctataattgaaagaatacaa

SEQ ID NO: 7967 - DNA, 168 bp, synthetic construct
  misc_feature 1..168: note = Description of artificial sequence: synthetic polynucleotide sequence
  source 1..168: mol_type = other DNA
ctttttcagttgatccacatcagagttactttctggcaagaccctgattccccgaccgtaactggtacctccatgaagatgaaactctaaacttaacattgtctgattctctgaattcattgattgaagtttggtatgaaggctatagattctaagaaagcttccaac

SEQ ID NO: 7968 - DNA, 157 bp, synthetic construct
  misc_feature 1..157: note = Description of artificial sequence: synthetic polynucleotide sequence
  source 1..157: mol_type = other DNA
ccttcagagatcttgccacatgaacatggttatcgtagactaaaatgtctattgtcagattttgtagccgatggatgtgacttaaatcaccttcaagaacaaggtcttgtattaagactctccaagatggaaatggtgtcctggtgccatcccatac

SEQ ID NO: 7969 - DNA, 292 bp, synthetic construct
  misc_feature 1..292: note = Description of artificial sequence: synthetic polynucleotide sequence
  source 1..292: mol_type = other DNA
cctttagaagaaatgatgctccgtccacttctgctttgcccaagagctgacaagtcaggtcaaaatactgcattggctgaacatcacacaattttagtaatgtccaagacggtgacatatgagtagatgcccaaacacgtaaggcttctaccattttgtggtcctcagtagtgaagttaaaatacttgcttgaagtgcgaggtatgataggggctcccaaagttccctcaaacgtcaaagatgcaaagccagagctggtgataccctgagtctcctttttatatacttgaat

SEQ ID NO: 7970 - DNA, 121 bp, synthetic construct
  misc_feature 1..121: note = Description of artificial sequence: synthetic polynucleotide sequence
  source 1..121: mol_type = other DNA
gcctgtgaaagcgaacaatatctccatttttataaattattggaagggcttcatagtttccactaaagagcaggcaagttagttttacatttgtctggtccacaatagttacaactgagca

SEQ ID NO: 7971 - DNA, 121 bp, synthetic construct
  misc_feature 1..121: note = Description of artificial sequence: synthetic polynucleotide sequence
  source 1..121: mol_type = other DNA
taccagttcctttgcttagatatgggggcttaaagaacttcacaacaccatagacattgacaattgtaccacccttaagttgattcaggggtgtatatatataatttgttgctggaaccta

SEQ ID NO: 7972 - DNA, 121 bp, synthetic construct
  misc_feature 1..121: note = Description of artificial sequence: synthetic polynucleotide sequence
  source 1..121: mol_type = other DNA
tgtggcatatacaggtataggtgtaatactctaaattaaactgaatatcatcttaccaaagacattgattctgtagaaaaatctcttaaagatttgacataaacctgaaggaaaaaaagaa

SEQ ID NO: 7973 - DNA, 121 bp, synthetic construct
  misc_feature 1..121: note = Description of artificial sequence: synthetic polynucleotide sequence
  source 1..121: mol_type = other DNA
aagtgcaacattgggatatctaataagagcaagtttgggcttcagtgaggaaacaataaaaattttgcagaagaagcacatgaatagatcatgagagtgggcaaacagcgtaagaaactgt

SEQ ID NO: 7974 - DNA, 121 bp, synthetic construct
  misc_feature 1..121: note = Description of artificial sequence: synthetic polynucleotide sequence
  source 1..121: mol_type = other DNA
attgtgctttgcatctgtccatcactgattgtccatcaccaggtttgatgggaagtctatcttactttctgtgataagtaggatgggctagatttgatgcagtaaaaagaaaactcactgg

SEQ ID NO: 7975 - DNA, 121 bp, synthetic construct
  misc_feature 1..121: note = Description of artificial sequence: synthetic polynucleotide sequence
  source 1..121: mol_type = other DNA
ctccatctcagctttgtttcctttggcattggctttattcttagacggtggcaaaagtgatcatcaaaaactccagtcctataccttccaggttggcaactccccaggaaaaagagctctc

SEQ ID NO: 7976 - DNA, 121 bp, synthetic construct
  misc_feature 1..121: note = Description of artificial sequence: synthetic polynucleotide sequence
  source 1..121: mol_type = other DNA
cttaacaagagaaaacagtgcctctttagaactggaagagcatgtctaactttgctaaatgacagagatacacaatttcctaaacttcagacttcccgaaaggctatgaaaagaattggta

SEQ ID NO: 7977 - DNA, 121 bp, synthetic construct
  misc_feature 1..121: note = Description of artificial sequence: synthetic polynucleotide sequence
  source 1..121: mol_type = other DNA
acataaaaatccagttgaatgaataagaaggaatttgggcgtataacccatggaacaccaatggtgctaagaatttgccaaaccctcagcttcgtataagtcccaaagaactcaggcttat

SEQ ID NO: 7978 - DNA, 121 bp, synthetic construct
  misc_feature 1..121: note = Description of artificial sequence: synthetic polynucleotide sequence
  source 1..121: mol_type = other DNA
aaactgtataataatggaattcacatgttaaagttagtgttcccttttcctgaaaatgtatcaaggacctagaccaaaattattggagctctattttcttctctagttctcttggatatgg

SEQ ID NO: 7979 - DNA, 121 bp, synthetic construct
  misc_feature 1..121: note = Description of artificial sequence: synthetic polynucleotide sequence
  source 1..121: mol_type = other DNA
ttctctgctgagtcttgcatggcccagaaagcagcaaggagttatcttattaagcttacatgaatacattgatctgactccactcttcccagaaaccctgaatcccagactctagataaag

SEQ ID NO: 7980 - DNA, 121 bp, synthetic construct
  misc_feature 1..121: note = Description of artificial sequence: synthetic polynucleotide sequence
  source 1..121: mol_type = other DNA
ttccttcagaaaaagaccacagccaagccagaaagcataacaacaattacacctgctagctttaaacttctccaaacactgacaaggttcttgtaagccagtgggggcactgcaacattca

SEQ ID NO: 7981 - DNA, 121 bp, synthetic construct
  misc_feature 1..121: note = Description of artificial sequence: synthetic polynucleotide sequence
  source 1..121: mol_type = other DNA
tataaatcctccaaaggcagaaatcattgttactccctgatgtattcattattttatacgatgctaggcacatagtagtgctcagttaatacttgttgaatgaatgaaggaacagggggaa

SEQ ID NO: 7982 - DNA, 121 bp, synthetic construct
  misc_feature 1..121: note = Description of artificial sequence: synthetic polynucleotide sequence
  source 1..121: mol_type = other DNA
gattttagccctttcaaaattgattgtagatgtattcactcaccagaataggcatgttaatctaatgttagtcctcttgtattgcatgtctaactttccacagctcaagttacagggtttg

SEQ ID NO: 7983 - DNA, 121 bp, synthetic construct
  misc_feature 1..121: note = Description of artificial sequence: synthetic polynucleotide sequence
  source 1..121: mol_type = other DNA
ataaaaggtttttttctgatcgcttgtaagtggcaaaataaatagtcctctggcactcttcagtatttagaagctgtttgactggaggcaaacatacacagactggtttgctcttcggata

SEQ ID NO: 7984 - DNA, 121 bp, synthetic construct
  misc_feature 1..121: note = Description of artificial sequence: synthetic polynucleotide sequence
  source 1..121: mol_type = other DNA
gatgaaagtgaggctacttctctgaagaagtgctatttaaggcaaaatgtaaaggctatgtaggagttctccatgcagagagtgggcaaaatggccttctggcaaaggaaatagtgtatat

SEQ ID NO: 7985 - DNA, 121 bp, synthetic construct
  misc_feature 1..121: note = Description of artificial sequence: synthetic polynucleotide sequence
  source 1..121: mol_type = other DNA
gtgaattgcaaatgaaatccataatgacaccatgaagtcacagaacctcccagaagatactgcaaggaaaattacagtgaaatccacaactatgcaagttagaagaaggcactagaagcca

SEQ ID NO: 7986 - DNA, 121 bp, synthetic construct
  misc_feature 1..121: note = Description of artificial sequence: synthetic polynucleotide sequence
  source 1..121: mol_type = other DNA
tctagtttgtcattcctcttagttcatgtcactctgtcaccactggcctctgcaaggtcccctcatttcactttttttttttttgagatggaatctcgctctgttgcctaggctgagacca

SEQ ID NO: 7987 - DNA, 121 bp, synthetic construct
  misc_feature 1..121: note = Description of artificial sequence: synthetic polynucleotide sequence
  source 1..121: mol_type = other DNA
tacactgtgtaaggccaccttgggatccaaaagataaaagagaagataagggacatgttctcctgatacactagctgggctccactcacccaagtcattaattggagtcttattgggctac

SEQ ID NO: 7988 - DNA, 121 bp, synthetic construct
  misc_feature 1..121: note = Description of artificial sequence: synthetic polynucleotide sequence
  source 1..121: mol_type = other DNA
tacgaacacaagacttaagaaataagagcagatgctgccatgatggtggctacttgaaggctgcaaattctcctgtagagggaggacaagagctaattttaaaaaagtcatctcaaataac

SEQ ID NO: 7989 - DNA, 175 bp, synthetic construct
  misc_feature 1..175: note = Description of artificial sequence: synthetic polynucleotide sequence
  source 1..175: mol_type = other DNA
ttcagtggacaggaaacgcaccatatccccctgcctggatgggtgtttttggagaagcacaagcatatagactaaaatcctctgtttggaaaccagcccgattcaaggagggttctgatgcactgcggtgaatttttggcaatgagcgggccagcagctcaatagaggcgagaat

SEQ ID NO: 7990 - DNA, 136 bp, synthetic construct
  misc_feature 1..136: note = Description of artificial sequence: synthetic polynucleotide sequence
  source 1..136: mol_type = other DNA
cttggggaaagagtggtctctcatctcttttctttttgaggcactctgccattaatctcttcatggcttttggacagttactccgtaccttactgagatctggagacaggtatcctcgtcccaccataaaaattat

SEQ ID NO: 7991 - DNA, 133 bp, synthetic construct
  misc_feature 1..133: note = Description of artificial sequence: synthetic polynucleotide sequence
  source 1..133: mol_type = other DNA
cctggtccctgttgttgatgtttgaataaggtaactgtccagtcatcaattcatacagaacaattccaaatgcatatacatctgactgaaagctgtatggatttttatcttgcattctgatgacttctggtgc

SEQ ID NO: 7992 - DNA, 121 bp, synthetic construct
  misc_feature 1..121: note = Description of artificial sequence: synthetic polynucleotide sequence
  source 1..121: mol_type = other DNA
ccatccacaaaatggatccagacaactgttcaaactgatgggacccactccatcgagatttcactgtagctagaccaaaatcacctatttttactgtgaggtcttcatgaagaaatatatc

SEQ ID NO: 7993 - DNA, 121 bp, synthetic construct
  misc_feature 1..121: note = Description of artificial sequence: synthetic polynucleotide sequence
  source 1..121: mol_type = other DNA
gttttcaaacttcgcagacaaatttcaggaaggatactattactcttgaggtctctgtggatgattgacttggcgtgtaagtaactgaaaaacaaaacatcattttaacctgagtagggct

SEQ ID NO: 7994 - DNA, 178 bp, synthetic construct
  misc_feature 1..178: note = Description of artificial sequence: synthetic polynucleotide sequence
  source 1..178: mol_type = other DNA
ctccatgccctgtgcagtctgtcgtgcaatatctataagtttgatcatctcaaatttggtctcaatgatatggagatggtgatacaagctggagccctcacaccactgggtaacaatagccagttgtggctttgtggaatagcccatgaagagtaggatattcacatgtcgtgttttc

SEQ ID NO: 7995 - DNA, 121 bp, synthetic construct
  misc_feature 1..121: note = Description of artificial sequence: synthetic polynucleotide sequence
  source 1..121: mol_type = other DNA
taattcacacaagctcacctgagtactcctacttcatttttgaaggcttgtaactgctgaggtgtaggtgctgtcacattcaacattttcactgccacatcacctaaaaggcaattgttac

SEQ ID NO: 7996 - DNA, 121 bp, synthetic construct
  misc_feature 1..121: note = Description of artificial sequence: synthetic polynucleotide sequence
  source 1..121: mol_type = other DNA
accatgccactttcccttgtagactgttccaaatgatccagatccaattctttgtcccactgtaatctgcccatcaggaatctcccaatcatcactcgagtcccgtctaccaagtgttttc

SEQ ID NO: 7997 - DNA, 138 bp, synthetic construct
  misc_feature 1..138: note = Description of artificial sequence: synthetic polynucleotide sequence
  source 1..138: mol_type = other DNA
ccattcgattcctgtcttctgaggatgaagatgacttcctttctcgctgaggtcctggagatttctgtaaggctttcacgttagttagtgagccaggtaatgaggcagggggggtagcagacaaacctgtggttgatc

SEQ ID NO: 7998 - DNA, 121 bp, synthetic construct
  misc_feature 1..121: note = Description of artificial sequence: synthetic polynucleotide sequence
  source 1..121: mol_type = other DNA
agtttccttgagtttttaaaaaaacctgaaatcactacttacctccatcaccacgaaatccttggtctctaatcaagtcctacaaataaatagtaatgtatatttattccaagcaagcata

SEQ ID NO: 7999 - DNA, 161 bp, synthetic construct
  misc_feature 1..161: note = Description of artificial sequence: synthetic polynucleotide sequence
  source 1..161: mol_type = other DNA
catcaatattgacaggttctattgtgtttatatgcacattgggagctgatgaggatcggtctcgttgcccaaattgatttcgatgatcttcatctgctggtcggaagggctgtggaattggaatggattttgaaggagacggactggtgagaatttggggc

SEQ ID NO: 8000 - DNA, 121 bp, synthetic construct
  misc_feature 1..121: note = Description of artificial sequence: synthetic polynucleotide sequence
  source 1..121: mol_type = other DNA
cccaatagagtccgaggcgggtgcggaaggggatgatccagatgttagggcagtctctgctaaggacgcctcttcctgtggtattgggtggtgttcaaagaacttggagacaaacagcaaa

SEQ ID NO: 8001 - DNA, 150 bp, synthetic construct
  misc_feature 1..150: note = Description of artificial sequence: synthetic polynucleotide sequence
  source 1..150: mol_type = other DNA
ctcaagttggtcataattaacacacatcagtggaacttctgtactacaacgctggtgaaatttataaccacatgtttgacagcggaaaccctggaaaagcagctttcgacaaaagtcacaaaatgctaaggtgaaaaacgtttttcgtac

SEQ ID NO: 8002 - DNA, 121 bp, synthetic construct
  misc_feature 1..121: note = Description of artificial sequence: synthetic polynucleotide sequence
  source 1..121: mol_type = other DNA
gatacatacaaagttgtgtgttgtaagtggaacattctccaacacttccacatgcaattcttctccagtaagccaggaaatatcagtgtcccaaccaattggtttcttctctctgaaaaat

SEQ ID NO: 8003 - DNA, 121 bp, synthetic construct
  misc_feature 1..121: note = Description of artificial sequence: synthetic polynucleotide sequence
  source 1..121: mol_type = other DNA
aaaccatacccatcctgaattctgtaaacagcacagcactctgggattagacctctcatcatcagtgctttctttagactgtctcggactgtaactccacaccttgcaggtacctatggta

SEQ ID NO: 8004 - DNA, 265 bp, synthetic construct
  misc_feature 1..265: note = Description of artificial sequence: synthetic polynucleotide sequence
  source 1..265: mol_type = other DNA
ccactgtcctctgtttgttgggcaggaagactctaacgataggtttttgtggtgacttggggttgctccgtgccacatctgtgggattttgaaaaactgaaagagatgaaggtagcactgaaaggctagaagaggaagaagatgtaacggtatccattgatgcagagctagaaacagaaaaatcagttccgttccccagagattccaataactgttgttctctttgttggagtgcatctagcttgctggtgtattcttcataggc

SEQ ID NO: 8005 - DNA, 121 bp, synthetic construct
  misc_feature 1..121: note = Description of artificial sequence: synthetic polynucleotide sequence
  source 1..121: mol_type = other DNA
aaaagcttacctccagatatattgatggtggattatgctccccaccaaatttgtccaatagggcctctatatgttcctgtgtcaacttaatcatttgtttgatattccacacctaaaaaat

SEQ ID NO: 8006 - DNA, 139 bp, synthetic construct
  misc_feature 1..139: note = Description of artificial sequence: synthetic polynucleotide sequence
  source 1..139: mol_type = other DNA
cctcctccggaatggcagggtccgcagccgaagaggccgcggcgccggcgccggcgccggcctcgggctccatgtccccgttgaacagagcctggcccggctccgcgccgccaccaccgccaccgctcagcgccgccat

SEQ ID NO: 8007 - DNA, 121 bp, synthetic construct
  misc_feature 1..121: note = Description of artificial sequence: synthetic polynucleotide sequence
  source 1..121: mol_type = other DNA
ttccgttgtggtagggtgttctggagctgtaggaggcagttggcagtcatggaaatggaagtgagagaaccacagatgagggaggggggtgaggaagtgactgtagctggcaaggaaggga

SEQ ID NO: 8008 - DNA, 121 bp, synthetic construct
  misc_feature 1..121: note = Description of artificial sequence: synthetic polynucleotide sequence
  source 1..121: mol_type = other DNA
tctccccaaggctattcctgtgagtatatcatattggctgaggctaacattcactctaatgactgcctagcctttatagagatgaatcaaaggcccattgcaatatccacaatctggtgta

SEQ ID NO: 8009 - DNA, 121 bp, synthetic construct
  misc_feature 1..121: note = Description of artificial sequence: synthetic polynucleotide sequence
  source 1..121: mol_type = other DNA
agcaacaggtcccaggaggactttcagctggggccgtcattcagctagaaatccagggctaggtttcaggagagggccagagatgtctagcatggtagtggggcacagtgacactgtgacg

SEQ ID NO: 8010 - DNA, 121 bp, synthetic construct
  misc_feature 1..121: note = Description of artificial sequence: synthetic polynucleotide sequence
  source 1..121: mol_type = other DNA
tttgctaagatacacagtttatcaagactgctaggatacaggtattgtatcacctaatcctcccttcactggaagtcagaagcttaaacaccacatgtgcctaataaagaataaaatacaa

SEQ ID NO: 8011 - DNA, 121 bp, synthetic construct
  misc_feature 1..121: note = Description of artificial sequence: synthetic polynucleotide sequence
  source 1..121: mol_type = other DNA
tcaatctcctatttaaaaagcctcaacattttctcatagcctttagaagaaacaattttttgtacattgagatcccaattcaatgcctctttttgtccatatctcattgcaactttgactc

SEQ ID NO: 8012 - DNA, 121 bp, synthetic construct
  misc_feature 1..121: note = Description of artificial sequence: synthetic polynucleotide sequence
  source 1..121: mol_type = other DNA
tacaatgtatgccattcagtttgacacagaatgaacaattttacatttttgcgaaatcaatgaccacattcaaagcaagaagaacgaagtgcgaaggccccagtttctgatgtgtctgacg

SEQ ID NO: 8013 - DNA, 121 bp, synthetic construct
  misc_feature 1..121: note = Description of artificial sequence: synthetic polynucleotide sequence
  source 1..121: mol_type = other DNA
tgtgaatggcagtgggtacacaaacatgtcgattctcttccagagttcttactcgctcaattgccaggtttgcttctattttggttacagaattaaaatgtaattagttgtgtttttaatg

SEQ ID NO: 8014 - DNA, 121 bp, synthetic construct
  misc_feature 1..121: note = Description of artificial sequence: synthetic polynucleotide sequence
  source 1..121: mol_type = other DNA
ttcagaggaggggggaggaggtagcagatgtcaagggatttccatttctctttcgatgccgacatacttcagggcatcagcctggctgtatctgaaacaacaggaaggagatgtccgctgg

SEQ ID NO: 8015 - DNA, 121 bp, synthetic construct
  misc_feature 1..121: note = Description of artificial sequence: synthetic polynucleotide sequence
  source 1..121: mol_type = other DNA
gaaatgtactttaccaacctgtaatcaaaaaacagctcttcgccagtctggatggctctcttggcaaaaatacctatcctgtgatcaccgttaaccatcataactgcaaagagacacactg

SEQ ID NO: 8016 - DNA, 121 bp, synthetic construct
  misc_feature 1..121: note = Description of artificial sequence: synthetic polynucleotide sequence
  source 1..121: mol_type = other DNA
ctcacgtcaaaggtacctaccttttgcatagcagtttggatttaccgaatgatttgcaaaacgaattttgttacccttgcgggttgcatccaccacaaaatctaaaaagaaaaaagtaagc

SEQ ID NO: 8017 - DNA, 121 bp, synthetic construct
  misc_feature 1..121: note = Description of artificial sequence: synthetic polynucleotide sequence
  source 1..121: mol_type = other DNA
ctcccagctctgaaacataccattgttcaagttgaacagaaagctgcacatgtatttatcatacactttccctcttctgtcagcttcatcttgagaaataatctaaaaagaaagacacagg

SEQ ID NO: 8018 - DNA, 121 bp, synthetic construct
  misc_feature 1..121: note = Description of artificial sequence: synthetic polynucleotide sequence
  source 1..121: mol_type = other DNA
atcagtgccttacctctccacagtattctgagatgaattcatttttctgcacaggatctttgataaaaatcccccagcctgccacgtcagatggtgccagcaatagatgctagagaataaa

SEQ ID NO: 8019 - DNA, 180 bp, synthetic construct
  misc_feature 1..180: note = Description of artificial sequence: synthetic polynucleotide sequence
  source 1..180: mol_type = other DNA
cctttttggagccccgctgaatactgcagttcttgcaggacacatttttactgtcccaatggtcagcggctccacaagtaagacagaggtcagggtcacactctcggacagccaggtagcacgggcactgcttggtgttgcactgtgctttgcagcggcatcccggaaagcggttttgac

SEQ ID NO: 8020 - DNA, 121 bp, synthetic construct
  misc_feature 1..121: note = Description of artificial sequence: synthetic polynucleotide sequence
  source 1..121: mol_type = other DNA
tctgaactacattgacaaaacttttcacaaaaattttgtgctatcacacaagggcacgaactgtcacaaggctgccgtggatgatcacagggttgatagttgtaaacatggttagaggagc

SEQ ID NO: 8021 - DNA, 121 bp, synthetic construct
  misc_feature 1..121: note = Description of artificial sequence: synthetic polynucleotide sequence
  source 1..121: mol_type = other DNA
attgttaagctaataatgagaggaatggaaagatgctaaccctttttcagctgtatctttctgcagtgtgcagcccacaacctgcaaaaacacaaagaaaattaaaccaaatttctgcggg

SEQ ID NO: 8022 - DNA, 121 bp, synthetic construct
  misc_feature 1..121: note = Description of artificial sequence: synthetic polynucleotide sequence
  source 1..121: mol_type = other DNA
atgacagactcaccggtgtttcctcttctttttccttggaggagtatccacatcctcagcgggagctggagctatgatgctagattctttgactctaaactcatacacctgacaagaggca

SEQ ID NO: 8023 - DNA, 171 bp, synthetic construct
  misc_feature 1..171: note = Description of artificial sequence: synthetic polynucleotide sequence
  source 1..171: mol_type = other DNA
cctgtctacatgttttggtcccaattaacctagcaatggcacagaaattgtcatagtaagtgccaatgaggactctaaacattgaggcttcagcaccactccactccacattctcaggaggttcaatatttggcttcatctttattggtgtttgacaccgagaatttgctt

SEQ ID NO: 8024 - DNA, 121 bp, synthetic construct
  misc_feature 1..121: note = Description of artificial sequence: synthetic polynucleotide sequence
  source 1..121: mol_type = other DNA
ccagaggagctcgaagtttcatctttcttctcttcttcttctttatcattgttctctccccccgtttcagtccctgcttccctatcactgtctgtatcctttgattccagcacattaatgg

SEQ ID NO: 8025 - DNA, 121 bp, synthetic construct
  misc_feature 1..121: note = Description of artificial sequence: synthetic polynucleotide sequence
  source 1..121: mol_type = other DNA
tgggggtgctgggcctgctactgttattgggaagccgtcctcttctgcggcctcctggacgttttggtggggtctttatccgctcagcggtgagagcagcagcaaactcctttgctccctc

SEQ ID NO: 8026 - DNA, 121 bp, synthetic construct
  misc_feature 1..121: note = Description of artificial sequence: synthetic polynucleotide sequence
  source 1..121: mol_type = other DNA
ggcactaagtcttaccaaatgctggtaacactgtggtccacaaggtttgttgtctagagctgtttctgtgttcttccgcttataagtgttgggtgttgcatgaaaagctgcaaaataaatg

SEQ ID NO: 8027 - DNA, 180 bp, synthetic construct
  misc_feature 1..180: note = Description of artificial sequence: synthetic polynucleotide sequence
  source 1..180: mol_type = other DNA
caataattgcacttacgatgtaggaagcagtcatatttaaaacatcgcctacagaaaagcgtatgaaaggagtgtaagctttgctctctctgaacagatttagcatttggtccatctatgttgggggtacattcaggaggaagtgcgcctgggagctgctgttcggtgagttctttatat

SEQ ID NO: 8028 - DNA, 121 bp, synthetic construct
  misc_feature 1..121: note = Description of artificial sequence: synthetic polynucleotide sequence
  source 1..121: mol_type = other DNA
aattcttacttttcctttagttcttctgctgtgcccttatctggaaacattgaggaaatggcttcaaaaattttatcagaaggaaatttccgaggtgggcggctttctttatctaaacagg

SEQ ID NO: 8029 - DNA, 142 bp, synthetic construct
  misc_feature 1..142: note = Description of artificial sequence: synthetic polynucleotide sequence
  source 1..142: mol_type = other DNA
ccatctcggtgatcctccagatctttctgcttttcttctctttcttcaggatcgtctccatcatcatcatcgtcatcatcattatattgaccaagggcattcaccaactccacaaaaatttcatcatttataaacccacatt

SEQ ID NO: 8030 - DNA, 121 bp, synthetic construct
  misc_feature 1..121: note = Description of artificial sequence: synthetic polynucleotide sequence
  source 1..121: mol_type = other DNA
ctctatccccgtgtactttcccatcataattttttattagttcttcaatgaaagtaccatcctgatctaaaacttcatctcccatataaggaatgttatgtaaaacagtttcatcttccac

SEQ ID NO: 8031 - DNA, 121 bp, synthetic construct
  misc_feature 1..121: note = Description of artificial sequence: synthetic polynucleotide sequence
  source 1..121: mol_type = other DNA
accataaaattctgctgtaggggagaccaagaatacattatgggtactgaagcaactgcattcagagtctttaatgggatgacttgtgttggaaaatccaagtcactggtcaccgaacact

SEQ ID NO: 8032 - DNA, 121 bp, synthetic construct
  misc_feature 1..121: note = Description of artificial sequence: synthetic polynucleotide sequence
  source 1..121: mol_type = other DNA
ctagtcccgcgcaatgagctcacagaagtcaggatgtgcacaggctgtatccttcgctgtttccattcttggtttaagatttccgttctttccaaaattttctgacgattggaactaaaca

SEQ ID NO: 8033 - DNA, 121 bp, synthetic construct
  misc_feature 1..121: note = Description of artificial sequence: synthetic polynucleotide sequence
  source 1..121: mol_type = other DNA
acctttacttcatcagctcgtctgaacctcttgagctgtctcagtcgcatgtactctgattttacacgcttccgccaacaaactggtcccttctcagatttcttcccagtctggcccatga

SEQ ID NO: 8034 - DNA, 121 bp, synthetic construct
  misc_feature 1..121: note = Description of artificial sequence: synthetic polynucleotide sequence
  source 1..121: mol_type = other DNA
cccgctattgcttgtgtcccctattgcagtcccacaaccccagcctgtggcaggaaggcatgtcacgtgctggcttccatttgtgtacatggcccttggtaggagggccaggcatgccctg

SEQ ID NO: 8035 - DNA, 121 bp, synthetic construct
  misc_feature 1..121: note = Description of artificial sequence: synthetic polynucleotide sequence
  source 1..121: mol_type = other DNA
ctctcacaacgctacagggcctctcctaggaggctcttctaacactgtgggaaccatatcgctgtgaacagcatttaggatgcagtcactgtcaattcgattttgcacagcagtgaacaag

SEQ ID NO: 8036 - DNA, 121 bp, synthetic construct
  misc_feature 1..121: note = Description of artificial sequence: synthetic polynucleotide sequence
  source 1..121: mol_type = other DNA
ttttggagtcaacaatggtaggtgggaggttggtgggaagtgaagctcaaacacagttcactcaacaacctgtactcagtaacaacagacatgttcatctcactaaaaaggagaaaaccaa

SEQ ID NO: 8037 - DNA, 121 bp, synthetic construct
  misc_feature 1..121: note = Description of artificial sequence: synthetic polynucleotide sequence
  source 1..121: mol_type = other DNA
gcaaggaatgcatttcagttcatccacttccggcagttcacagctccacagtgacacggaatcttgtgctggtcatcttcaaagtcaaacttatagtcatagcagagctgcccacggcaaa

SEQ ID NO: 8038 - DNA, 121 bp, synthetic construct
  misc_feature 1..121: note = Description of artificial sequence: synthetic polynucleotide sequence
  source 1..121: mol_type = other DNA
tcttacctcttctcctttctggattctccgactggagctgatgataattttgtgtcctctctcaaaagtcaccacttcagccacacaattaggtgcacacgaatggttgatatacctgcaa

SEQ ID NO: 8039 - DNA, 121 bp, synthetic construct
  misc_feature 1..121: note = Description of artificial sequence: synthetic polynucleotide sequence
  source 1..121: mol_type = other DNA
ccgtcaggttcctcgctgtctcaccttgcgggccctcctgtgagcgtcgcgtcaatcacatggtcgttatccatgcggaacatgtacacaccacggttctgagggaaaagtcagtcagtaa

SEQ ID NO: 8040 - DNA, 121 bp, synthetic construct
  misc_feature 1..121: note = Description of artificial sequence: synthetic polynucleotide sequence
  source 1..121: mol_type = other DNA
acctgagactcataaagcttctctttcctgttggctacttcgtttcgaatgatagtcccgatgtactcaatgaccatggtgtgtttctcaatgtctcgagcagcatacaggcccagcccct

SEQ ID NO: 8041 - DNA, 170 bp, synthetic construct
  misc_feature 1..170: note = Description of artificial sequence: synthetic polynucleotide sequence
  source 1..170: mol_type = other DNA
cctgaatccgagaccgtgccagatacacattggatttccattcagttttcatcttccggtactgcgatgacttggagtgaacaaactgtttactataaggtgcgttcagttctccagtgactgtgctctgaaatgactttgaggtgctggtgctgtttaaggtgtgaggc

SEQ ID NO: 8042 - DNA, 144 bp, synthetic construct
  misc_feature 1..144: note = Description of artificial sequence: synthetic polynucleotide sequence
  source 1..144: mol_type = other DNA
ccttaacacaaacctcttgacatgggcactcattttaggttcagaacgggcacaacctgtggggttaacggcaagaggaagttccatgagaggatttcggccgtatcggaaggtataattttcacatgcctcaaccccaggaag

SEQ ID NO: 8043 - DNA, 138 bp, synthetic construct
  misc_feature 1..138: note = Description of artificial sequence: synthetic polynucleotide sequence
  source 1..138: mol_type = other DNA
ctgattccgctatgcgtgccactgcagagacggtcaggccaaacagatcctctccttttaaatacgctgggaaaagctggagcatttcagacttttttctcacacatgccacaggctccaaaatcttatcccagacac

SEQ ID NO: 8044 - DNA, 333 bp, synthetic construct
  misc_feature 1..333: note = Description of artificial sequence: synthetic polynucleotide sequence
  source 1..333: mol_type = other DNA
cctttaggtgagatgtcacttagaaccaggtcttcatggccttgttccacaatcctgatgacaaacactgggcgcccatccttctcctcaatggagcacaggtagcggcagcgcctattggcatagcgagtgctccagtacagccggctggcttcatagcccacagggaagagtgctttaggagaatggaatgcttgcatctgctgtggaagcagctgaccaattgtgtggaagatgaggctacccacgcgaaaggtatggtcccgttctcctcgttgcacgatgctagcaatctgtcgcacctcatcacgctgaacatagaccctcctgaag

SEQ ID NO: 8045 - DNA, 445 bp, synthetic construct
  misc_feature 1..445: note = Description of artificial sequence: synthetic polynucleotide sequence
  source 1..445: mol_type = other DNA
actgcaaagtaacttaattcttgctcatgaattccctttggtttgtgcatggggcaaagcatagttttgtccttaaaaaacatgcattgtgctttaatggcgcaagtgaagtgataaatgttggtgcatcgaaatctgtggcatccactagtggcacccgtcttgtgacagaagacacatttcatttgtaggcctctcctcagagctagctccacatttattaaggcaccagcctgagtctcatagacctccgtggaccacagagcgcagttcaagtggacccacagatccaagtcaaggttgagtagccttgctggtccatctgtcaatccatcaccttcttcatgacaaaagcaacatttccgatagtctttgggcacaggatcaggtttaagggaagtgcccaatttctttagaaattcatctatttcatcctcacaaggtg

SEQ ID NO: 8046 - DNA, 343 bp, synthetic construct
  misc_feature 1..343: note = Description of artificial sequence: synthetic polynucleotide sequence
  source 1..343: mol_type = other DNA
gtttaaatgtccccttagggattacaatatgaatgctccacttcttccatttcattcctctccattttttattgagcggcctgcaatcttcaaacccaccatggacagctcttagccgaggcttcagcttgactgtcaccttcagctcatctggcttggcctcgacttgggctgcttcaaaagcaggagggaaggcgatgggtggtgaggcagggggagaagctttctctgggagctgggggagacagtgcacatccaaagtggagatgttgttgctgtactgatgaaatgctttggaaggcgtttctctcataggtgattgtggcaatgaaggaatggattc

SEQ ID NO: 8047 - DNA, 121 bp, synthetic construct
  misc_feature 1..121: note = Description of artificial sequence: synthetic polynucleotide sequence
  source 1..121: mol_type = other DNA
atctcaccttgttttctgagtttttcgcttgtgcagttgatgaataaagaataaagcagttattactacagaagacaatgtccttctctaccctcttggtgctttctcgggaatcctgaaa

SEQ ID NO: 8048 - DNA, 141 bp, synthetic construct
  misc_feature 1..141: note = Description of artificial sequence: synthetic polynucleotide sequence
  source 1..141: mol_type = other DNA
ccttgttcaaaagggtcagatctttgaaagatttccgcacaccacttccaagaataaccactttacaatgacaacaccactgtggtctgagtgctgcgctttctgcaataccatgactagaatccttatatccagaaagac

SEQ ID NO: 8049 - DNA, 121 bp, synthetic construct
  misc_feature 1..121: note = Description of artificial sequence: synthetic polynucleotide sequence
  source 1..121: mol_type = other DNA
ccattgcttgttggaggaaatggtacattaggctgcttcagccggtaagagctcactaatctgggagggtttgcagatcctggcggaggcccacggagaagtaaatgctgtcgatactcca

SEQ ID NO: 8050 - DNA, 121 bp, synthetic construct
  misc_feature 1..121: note = Description of artificial sequence: synthetic polynucleotide sequence
  source 1..121: mol_type = other DNA
tgattctgtggctactgaccaaacccatggatgggacatctggagcactgctaacctcatagctgttagggattcggacgtgaagaaggtcggaaaatgcagccacaacactgctaatgtt

SEQ ID NO: 8051 - DNA, 138 bp, synthetic construct
  misc_feature 1..138: note = Description of artificial sequence: synthetic polynucleotide sequence
  source 1..138: mol_type = other DNA
cctcagcagctgtaggatgcagagtaattgctacagatataagacctgatctgggaccatttggggaaggaccaaaaggtgacgcaaaatataaagtgcctggctcagttttgatgtcattccttcttgattctgaac

SEQ ID NO: 8052 - DNA, 180 bp, synthetic construct
  misc_feature 1..180: note = Description of artificial sequence: synthetic polynucleotide sequence
  source 1..180: mol_type = other DNA
cttttcccagcagtgctaggaagaattggaatgatgggggacggcaccggttctggaggctcctccttgaccaatgacagatctggatacctgctcacttctaccccaaccacactctcaggagaggatgagggaacaaaactgtcaggagtatctcgatcaccacagtgatcctgtatc

SEQ ID NO: 8053 - DNA, 149 bp, synthetic construct
  misc_feature 1..149: note = Description of artificial sequence: synthetic polynucleotide sequence
  source 1..149: mol_type = other DNA
ccttaattcttcctgattgttatgaggtggtgttgggagggaggctggcacatcaactgtcttggggccctgagcaagagctcgggccaacaagtcgtcctggggtctgaagggcagctgaaatggtttaggtcctagagttttggtaa

SEQ ID NO: 8054 - DNA, 143 bp, synthetic construct
  misc_feature 1..143: note = Description of artificial sequence: synthetic polynucleotide sequence
  source 1..143: mol_type = other DNA
ccttcatggctcactaacactccggcttttccagcaagttcttcagttgttgcaaaaccattggccatcttctgacaagccataggaggtggtgtaggaggaagagaggcagggggtgttggaggattacttaaattattctg

SEQ ID NO: 8055 - DNA, 211 bp, synthetic construct
  misc_feature 1..211: note = Description of artificial sequence: synthetic polynucleotide sequence
  source 1..211: mol_type = other DNA
cctgtttcaagtgggtaaacgtgtcagtgctagagtacatagcttgtttctcctcttcgtcctttttccttttctttgagcgaggtgctgctttctcacccgtcctctgagtccgtttgcttcgctgtttcttggtttcacttcctccatctgtttttggcaactggttgccacatccaaaaccaccttgcatttgagcccccaaagtttg

SEQ ID NO: 8056 - DNA, 340 bp, synthetic construct
  misc_feature 1..340: note = Description of artificial sequence: synthetic polynucleotide sequence
  source 1..340: mol_type = other DNA
ccagtccttcagctgggttctgcttctcaactagtttattatcctttgtacagtcatcttctgaacaaatactgccctcaggtttttgattcaaaagagaagatgactttttatttttcaacaagtgtttcagaagttcattccctgagtctcctttggcagcaggggccccagcagaatggggaggactctgtgctgaggagacaggacaggctacagcgtttccttctaccttactaccattctgttcctccaatttaggctcctcttggcctgggcaggactctgtctcagccttttccagttttatctcttctgttttggcaggggtttccatgga

SEQ ID NO: 8057 - DNA, 454 bp, synthetic construct
  misc_feature 1..454: note = Description of artificial sequence: synthetic polynucleotide sequence
  source 1..454: mol_type = other DNA
gagcttgtctacttctgaatttgcatacgtctgttgatttggagttgcttgtgagaaatcactattgggcagtttgttctctaattctgtacatagctggcctgctgccatattgggagtggatgggccgactggttccaccgactcttggtcggcttgttgaggaagctcactgggtgtgctcactgcaggagtagaggtagtttctgagatgcctggagtcggtggggcagttatatctgaatggggagttgatggagccttggtggattctgcatcatcatctcttttcttctttcttgttcttttctttttccctttttcctctgggattatatcagaatacaactgaatgagcgattgggttgatcccggataactgtgtccatgggttatagtagaatcttggccacatgggagactgctattagctactggaggtgctgctggtaaa

SEQ ID NO: 8058 - DNA, 455 bp, synthetic construct
  misc_feature 1..455: note = Description of artificial sequence: synthetic polynucleotide sequence
  source 1..455: mol_type = other DNA
gcaggtgtaaaagaaggcctcactggggactgctggaagctggtcccagaaagatttccatgtccctgcttcacagaagaaaaatttgggcttccaacagggattgatggtgaatcaggaacaaatgaaggagggcctacctgccttcgctcattagtctgcatgaaagtttgggtggagggtgaattaattgatccttgttgtatattctgctgctgtaaaacctgccccatttgctgttggtgttgtggagactgctgaaggggtcctagaggttgcataaaatcacaaggtaagtcggaactgtagaagggaatctgggacacagatgtcctactactacttatctcagagcccaccataccatgctgctccatttccatcctctgctgcaaagctctttgtctatctacctcctgcatgagttggatccgttgtctctcttgctgttctcg

SEQ ID NO: 8059 - DNA, 462 bp, synthetic construct
  misc_feature 1..462: note = Description of artificial sequence: synthetic polynucleotide sequence
  source 1..462: mol_type = other DNA
taaacgttccttacgttcccgttcttgaaaactttcactaaagggattgttgtcatcaaattctacccgaggtggtggtccactctgtggatttgcatttgagactgtccctggggctggtgtacaagtttttattggtaactgggcaattgggggctgaattctaggaggattgaggggcaggtgggcaggagcactgttgggttgccatccaggtaaactgggcattctaacagggctagtatggccagaaataactgttgtgtgctgctggtgctgaagctgctgtggcaccatgggaaaggtgggttggctcatggtgggtggagtggcacctggaattaggggtggctggggctggacactgggcatcatggtaggtggggccattgcacattgctgctgctgtttgatccgataatcttcaatcaattcagcatgttctttctgttgtttacgaat

SEQ ID NO: 8060 - DNA, 234 bp, synthetic construct
  misc_feature 1..234: note = Description of artificial sequence: synthetic polynucleotide sequence
  source 1..234: mol_type = other DNA
cctgttctagctgtttctgaaccatgctttgctgttcagtaacatgcttgagttgttctgcatcttcctctggaaattcacgcccagctttcttggcagtacgttgtttagctgaaagggccttcttagattttctgtgagcaccaatttgttcttcaagatacttctgctgcatttgaagcagctgttgggtctcctggagccactcttcatactgcttacgctgtgaatcat

SEQ ID NO: 8061 - DNA, 121 bp, synthetic construct
  misc_feature 1..121: note = Description of artificial sequence: synthetic polynucleotide sequence
  source 1..121: mol_type = other DNA
aaacattaacttattagatttatacttactgacaaagcctggaccaaaatttggaggattaggcctagaaatctgatgtgttatactgccatcctaaaataagtaaaatttacaaatatgt

SEQ ID NO: 8062 - DNA, 121 bp, synthetic construct
  misc_feature 1..121: note = Description of artificial sequence: synthetic polynucleotide sequence
  source 1..121: mol_type = other DNA
actcattacaggcagtgttacctgaggaatggcctgtggtccaaggttctgtccttcactgttctgtgttccagttaccacctggcccataaaagggaacctgtcaaaacagggtacacaa

SEQ ID NO: 8063 - DNA, 121 bp, synthetic construct
  misc_feature 1..121: note = Description of artificial sequence: synthetic polynucleotide sequence
  source 1..121: mol_type = other DNA
cctacctgctcatcaccattggtggcatgcccagattgttttgtgccatcactttatttatacctttaagggccaccattttggctttcattataggatctgtaattgcatcaaaatctag

SEQ ID NO: 8064 - DNA, 454 bp, synthetic construct
  misc_feature 1..454: note = Description of artificial sequence: synthetic polynucleotide sequence
  source 1..454: mol_type = other DNA
ccaatattagggaagaacggttctgatcgctgacgaatcatggcttgcatctgtctttgctgctgctgttcttgcctttcttgatccaaaagatcctgtagaagtagaggctgttcttctagaagaaggggcctctctctattctgctgtgctaatgtttgaggaatcattagctgttggggtccagacatgctactggtaccagactgacttgtttgaggcccagtttgagttgcaggttttcctgtccccagactgtggttaactgttgattgacctggaatgagccctgggtttacctgcacaccctgagaaaaaacatggtttaccctagagactactgtcacattagaattcatggcattatccaaaacacggccaggcggtgctatgaaaggaggcaaacttgacacatgattggatggggaggccggcagagttggtggtggtggag

SEQ ID NO: 8065 - DNA, 454 bp, synthetic construct
  misc_feature 1..454: note = Description of artificial sequence: synthetic polynucleotide sequence
  source 1..454: mol_type = other DNA
accccgatggcctaatgtctgaattatcagatttctcattagcaagtaaacttgagagaactggagttgatccagttatgccacaagagtttattacatcttgagcaggtagttgagtggatgcctgaatgacatttgcactggggccagcagtttctcgattggttcttttctcaaatagatctggatcacaaggatgcaaagaagtcttttctccatcatttaggtctgagtgagcagaagcctgtgagcaaggagtgtcaacattatctttattctcatcatttttttcagtttcacatttggattccaccttagaatttggagacagtacttccgtttttacctcattggtaacagtggattttttctgtggtgaatgtttatcagagagaaccagagttttgttttcttgttcctttttttttggttcaacagatacacactgattatc

SEQ ID NO: 8066 - DNA, 452 bp, synthetic construct
  misc_feature 1..452: note = Description of artificial sequence: synthetic polynucleotide sequence
  source 1..452: mol_type = other DNA
taacttatcatcaattggaaggtctagttcctcattaaacatgcttttcttatctcccatgtcaagttctggatctgtatatgcaatgatatcaaactctcctgaccttaagaggtcatccaggttgggatcattagtttccaaattatctaaagtatccaattcaactaccttgccatcctctgtatctaaatttaagttttcaagatcttcatcatctaagtctttgacttcaaccccctcaaggtctttaacatccagttccttcacagaagggtcatcagaatcaagtttttcctctagaccatcagaaggctgggtggttatctgtaaattatcagacgttgtttcagacggtacagatgttgacaaaggagcttctgaaaattcaccacctagtggatggttcagagtcctcatgaccatagaagatgaatggacagaatgacctt

SEQ ID NO: 8067 - DNA, 461 bp, synthetic construct
  misc_feature 1..461: note = Description of artificial sequence: synthetic polynucleotide sequence
  source 1..461: mol_type = other DNA
gctcttgttgagatggtggcacttgttccaaatctgggtgcacaggtagctgattaggtagaccctggggaggtcgtcgcatggggtctgtgtgtctagggcccggaaagtctggccggggaatgaagtttccatgtctcagattagaagatgcctctacaacgctgccaggtggagcactgaaaggcagccgttgccttccgtcaggagccctatgtctcagttcaatatatgcttggcccagtatgttgtgctgctgaactggcaagctctgtggtgaaaaatgctgaggaagtccaactggattattcatttgtgagttatttaaaggcctaggcatatctacagatactgatcttcttagctgtggagaaactccagatccctgtatttgctgaggaggcacaaggaagcgctcttgactcggcatggtaccatgactacctcctggaaatccaaat

SEQ ID NO: 8068 - DNA, 294 bp, synthetic construct
  misc_feature 1..294: note = Description of artificial sequence: synthetic polynucleotide sequence
  source 1..294: mol_type = other DNA
cctaaatccatgaggtctcatccccatactagcaacatcaggaggatagggtccacgctgatcttttgggaaaacagcatatctaggtcctaaaggaggggcaacaggagacctaatgttcccaggatagggaggtgggggtctggtgaaagcctggttaacattctctggttgccagtgttgaagaggccctggatgaggcactgcgggtgagtcctgtgaccccttctcctgtcgacctgcaatcttcttctgctgttgctgctggagaatgatttcacgtaacttctgccg

SEQ ID NO: 8069 - DNA, 470 bp, synthetic construct
  misc_feature 1..470: note = Description of artificial sequence: synthetic polynucleotide sequence
  source 1..470: mol_type = other DNA
cctgtctcaatttctctgtatctgcttgggccatatttacagtattctgtgtatcagttactcctgaagttggcacaggtccaggaagttgggagacaccagagaactgctggccttgggagtgcattggagagtttgaagatgcacagaagctcccctctgatccaggccttggctgatcagcaacatcatgggcagtttgacttgttccaaaagagtcagactgagatcttggagtcattggagactgatcatagggatcacgggcagcagatggggaaacacggctaaatgtgtctgaaagaccaggtccagggggcctaggtgtctgggaacatgtatcaggtggccttaccaacgggccaggtaaagctggtcctcggttttgtgctgcttgcaggaaaggatcctgatttggcatgaggactggtcttgtcattgaggacctagtaaaaccctctgaaatcctt

SEQ ID NO: 8070 - DNA, 470 bp, synthetic construct
  misc_feature 1..470: note = Description of artificial sequence: synthetic polynucleotide sequence
  source 1..470: mol_type = other DNA
ggccttggtgttgctggtggctgagagtaagggacagaaattccaggtcttggtgttccaggaggatgagcatatggatcagaatgcctctgatttgttacaggtgtaacaaacaagtcagtttgtgtagatggtcttggggtttggggctgctgactatatgggtcaacagtagtaggccggggagttccaggaggttgagagtaagggtctgtattggacctagctgttcctgaagattgggaataagaatctacaacaggtcgtggagttcctgggggttgggagtatgggtcctgagatgttggccttgatatggttccaggctgggaaaaagcccttgaaggatgggcaaaagattcattcactgctggatgtggggtaaggggaggctgactatatggatcatttgactgattatgagaaaaattatctataggtcttggtgtcaaagcaggcctttcataagg

SEQ ID NO: 8071 - DNA, 472 bp, synthetic construct
  misc_feature 1..472: note = Description of artificial sequence: synthetic polynucleotide sequence
  source 1..472: mol_type = other DNA
gtcaacagacaatcgccttgatgcctgtgacactgatccataaggatcctgagaggatggaggaggttgcattggagtcttaaaaggtccaggaccactatcaagaggtgcaggtgtcaacaagggtcgtgcatatgagtcaggtatcctttgtctttgaaacacatctgccctaggagatggtttagtaaagtgatcactggttccagctgctatagggccttttgcagtttgttctgaaactacaggagaccgggataggcccaaggatttgggaaattgatctgtcatcacaggcctaggtgtgtctggaggttttgcataggggtcattatttgtcgtggaagaagaacataaatctctgacaggggatggcctatttgctgttgtctcattcatttgaaggggcctagataccgatgataaaggtgtacagttttccactggtgcagcagaatttcttctggaaaaa

SEQ ID NO: 8072 - DNA, 473 bp, synthetic construct
  misc_feature 1..473: note = Description of artificial sequence: synthetic polynucleotide sequence
  source 1..473: mol_type = other DNA
ctatggcccacaggaggtggtcgaggggtaccaaccatttttgcatatggatccattggagatggtggtcgtgagttagaggacccaggtgaaaacacttgcggtgagggtggctgagaagtctgagcctgagaaagactatcctggatgggaatccgggatggggctggaggaggaggtggagcttgtggctttacaaacacatcatctgaagatgtagacgtaggggtactgggtggctgttttgtaaacagttctttatggaatgactgtgcaggagacatatttccattgccaggctgaggtgtcaagggactctgtatcccactacttggtgtatctgaaccagactgcaccagaagatgctgagaaccaaattgctgttgttgctgctgctgctgctcatttttcacctgttcaagtttctgtgtggcttcaattttagcttgctgcttacttttctgacgcatttg

SEQ ID NO: 8073 - DNA, 184 bp, synthetic construct
  misc_feature 1..184: note = Description of artificial sequence: synthetic polynucleotide sequence
  source 1..184: mol_type = other DNA
cctgtctaaatttccattcctgttcatgttctgattctctttgctttaaaggatctttaaaaagctccgaatcaatacgagagctgggatcaatgctatcttgctgttgctgccttttcatggaatcatttgacatctgtactttattaatgcgtaaagcagctctgttatctctggctttttg

SEQ ID NO: 8074 - DNA, 121 bp, synthetic construct
  misc_feature 1..121: note = Description of artificial sequence: synthetic polynucleotide sequence
  source 1..121: mol_type = other DNA
agatagaggagtttcttaaaataccacatatggtgctctttcttgtgagcttgcttttctccacaatttggcaatttgcttcactctagtagtccaatctgcaacaaaagaacagagtata

SEQ ID NO: 8075 - DNA, 216 bp, synthetic construct
  misc_feature 1..216: note = Description of artificial sequence: synthetic polynucleotide sequence
  source 1..216: mol_type = other DNA
ccagggaattcttcctttaagttggggaaattaatattggtgtagagaactggggcaacagttgccatttcacccagagcctcctctttctcccacttaagcgtgcttctctgggcattcgacattgtgtcattttctccttccacagtgggagctgatgatgtccaagagttgttaggatcacttgccattggattaaaggctgaatttttatcc

SEQ ID NO: 8076 - DNA, 134 bp, synthetic construct
  misc_feature 1..134: note = Description of artificial sequence: synthetic polynucleotide sequence
  source 1..134: mol_type = other DNA
cctggcatcaggataagaggattgtgcaattgcagagaaagttcccagtccgcttccaggtggcaaagaattatgtgggagatgaggactggatccaataaggccattcatgagaggcatccgtgaaaaagcat

SEQ ID NO: 8077 - DNA, 121 bp, synthetic construct
  misc_feature 1..121: note = Description of artificial sequence: synthetic polynucleotide sequence
  source 1..121: mol_type = other DNA
ccctgattgtgtattggcaacagctgtgttggtgggggaggctgtggcaatggagttggctgagtgttcgcaggactaagtacagctgtaaataagtcttcaacatcttttccgccaagct

SEQ ID NO: 8078 - DNA, 121 bp, synthetic construct
  misc_feature 1..121: note = Description of artificial sequence: synthetic polynucleotide sequence
  source 1..121: mol_type = other DNA
ggggaacgccattttcattaactagaaaatcaaaacacatttacctggaattttatataattttccaagaattgctcctagaataaattaaaaaaaaaaaagaaacattaacagctactaa

SEQ ID NO: 8079 - DNA, 121 bp, synthetic construct
  misc_feature 1..121: note = Description of artificial sequence: synthetic polynucleotide sequence
  source 1..121: mol_type = other DNA
tgtgaccattttgtctagttcaggactgaggatcccatctagctgttcttcacttaatggtcgtgaactctgattgacatttggctgaggcaaagaggaaggatcatcagtgacaggacca

SEQ ID NO: 8080 - DNA, 121 bp, synthetic construct
  misc_feature 1..121: note = Description of artificial sequence: synthetic polynucleotide sequence
  source 1..121: mol_type = other DNA
atatatacctgaatgatcaactgattttgctagatcatctgaaattattccaagaatgtcatcatctgtgtttaaaacttcagaaatatcagctaatgggtcatcagcaggacctaaatat

SEQ ID NO: 8081 - DNA, 182 bp, synthetic construct
  misc_feature 1..182: note = Description of artificial sequence: synthetic polynucleotide sequence
  source 1..182: mol_type = other DNA
ccgtgagttccagattttgttggagccgaggatgaactaagtagtggatctaaggaaggatccaagaaacctgtgttcatgtttgttttatataaaagctgagctccatcttctgacagattatctaaacttatcttgctttgtctacttgtatctagaagatcttttccaaagaaagcttc

SEQ ID NO: 8082 - DNA, 121 bp, synthetic construct
  misc_feature 1..121: note = Description of artificial sequence: synthetic polynucleotide sequence
  source 1..121: mol_type = other DNA
aataggcagggaaagtttcttcaagcttatttttcctttttcggtatctcttctttattttttcagtgctttcagtaacagaaacagattcatcaactaaagtatctggtaactgctcact

SEQ ID NO: 8083 - DNA, 121 bp, synthetic construct
  misc_feature 1..121: note = Description of artificial sequence: synthetic polynucleotide sequence
  source 1..121: mol_type = other DNA
ccatcatctctgcaaggtaactgctcggaaatagagcctgaggaatcttttctgatcacagatcttttggttttcccttgcccagttcgacttctttgccgcaccataaatccaccaatac

SEQ ID NO: 8084 - DNA, 121 bp, synthetic construct
  misc_feature 1..121: note = Description of artificial sequence: synthetic polynucleotide sequence
  source 1..121: mol_type = other DNA
tctgtatggtttcctttttctctttttgacaccatctgttccttccactcccttagtttcatcatccacagcttcccgctcaggactagattctgattttccatcacaatccataagttct

SEQ ID NO: 8085 - DNA, 214 bp, synthetic construct
  misc_feature 1..214: note = Description of artificial sequence: synthetic polynucleotide sequence
  source 1..214: mol_type = other DNA
cctcgactatcatccatttcaccatcccttgaatgctctgattggatgtctggaggggtctgaaggacggccacgctattctgatttataatcttcaatttcaattttggttttgaccgttttcttcttggaactgtaactgtgaggctctgtaactgagtcatccctgattcagtcaaacacacaccatcctgggtataagtcttgggtgggt

SEQ ID NO: 8086 - DNA, 121 bp, synthetic construct
  misc_feature 1..121: note = Description of artificial sequence: synthetic polynucleotide sequence
  source 1..121: mol_type = other DNA
aaatcaagtaaagcatttcaaattttacctagctcttttacttttgtgacaatttgtgctacaagtgaagattcacagcagtctgaggaaggcactgaaacgaaaaaaaaaaatccaggta

SEQ ID NO: 8087 - DNA, 121 bp, synthetic construct
  misc_feature 1..121: note = Description of artificial sequence: synthetic polynucleotide sequence
  source 1..121: mol_type = other DNA
tcttaccattagacgcaggcatatagggtctgcacatgctacaatcaaaaccaatgtctgctacattttccacttcttcctcagtatttaagttctgacaaactgcatgcatccatctaaa

SEQ ID NO: 8088 - DNA, 166 bp, synthetic construct
  misc_feature 1..166: note = Description of artificial sequence: synthetic polynucleotide sequence
  source 1..166: mol_type = other DNA
cctatcacattgtctacattgcagaataagatcttcttctctatagtttcgatagcagactggacaggaagataagcttgcacaaggagcgcactgtgtgtaattgttctgccattcacatcttagacctgcagatgttgctccacagtgtctgcaccaaacacac

SEQ ID NO: 8089 - DNA, 183 bp, synthetic construct
  misc_feature 1..183: note = Description of artificial sequence: synthetic polynucleotide sequence
  source 1..183: mol_type = other DNA
ccatttgcacttccagcctcctttgggaactgtctgcaatggagggtctaggcagtaggtgtgataacttatgtcacagtcatcacacagcaggagtcttcctgggtcagttgccttcccacaggcctcacacacagtgcactcaagacacctccaacctttgctaagaaccactttagtgat

SEQ ID NO: 8090 - DNA, 121 bp, synthetic construct
  misc_feature 1..121: note = Description of artificial sequence: synthetic polynucleotide sequence
  source 1..121: mol_type = other DNA
atgtttaccttaatactgacacagtatggatggtaacactgaccacactgagaacaggcaagtaatcttccttctgctccttggccaaaactgccacaaactacacacatatcctgaagtt

SEQ ID NO: 8091 - DNA, 121 bp, synthetic construct
  misc_feature 1..121: note = Description of artificial sequence: synthetic polynucleotide sequence
  source 1..121: mol_type = other DNA
aagttcaaacctgattcaaagtgaacttgtcactgctagaaaacaacacaactgtattgtgcatagagttttcttcatcatccttatttgatgaaatatctgcagtagacacctataaaaa

SEQ ID NO: 8092 - DNA, 121 bp, synthetic construct
  misc_feature 1..121: note = Description of artificial sequence: synthetic polynucleotide sequence
  source 1..121: mol_type = other DNA
accccaggtaatacaacagctccgattccacttttcagctttgacctgcctcggccacctcgccccgacagtcctgcacctcgaggtctccgctttcctggaaatccagacccacggccct

SEQ ID NO: 8093 - DNA, 121 bp, synthetic construct
  misc_feature 1..121: note = Description of artificial sequence: synthetic polynucleotide sequence
  source 1..121: mol_type = other DNA
ccactttgatgctccaaatggcactgccaggaagctgcctgggtttaaaaatttcccgaccttctgaaatgtctggggaccaggaaggtgggctcactgtattatgggtactccaagcccc

SEQ ID NO: 8094 - DNA, 359 bp, synthetic construct
  misc_feature 1..359: note = Description of artificial sequence: synthetic polynucleotide sequence
  source 1..359: mol_type = other DNA
cctgtttggaccgaggtctaccaggagaaaattttctcttagtaatagctggtttacccatgccaatttttggagtgactgagatgtaagttgttggcatgatgtttccagcagaggaactaagagctgaagggtaattatgcagcatgtcatgcgaaggcaagtctgaagaaggtgttggggaggaagacacatctgccttgcttatgtctgctgatgatgaaaatgatgactctgtctcagatgataactttatagatttgcctccttggtatgaaacatctttcacacaaccctcaattgtaggagtcatttcagagtccatcaatccagtagaaagttcagaattttctttctgt

SEQ ID NO: 8095 - DNA, 361 bp, synthetic construct
  misc_feature 1..361: note = Description of artificial sequence: synthetic polynucleotide sequence
  source 1..361: mol_type = other DNA
tccttttctccttgtagcctttctataaccaactgttcctcaggacataatgaaatactttcctcatgtggggacactaaggtttctagtggaagagtgacagattccatgactaattttggaggccttgattcttctctggataccactgtttcaggttcctctaacaactgcagttgttcttgctgcacagtgatctggtgtgtaacgacttcaatgttttctgtcacttccattttatcttcaatttgatcttcgccacaaatatgcttcacttcagaagacattttcaggtcttcactatcaacttcattagaaatctgtttttccaattcagtattcactgtatgttgggatgata

SEQ ID NO: 8096 - DNA, 121 bp, synthetic construct
  misc_feature 1..121: note = Description of artificial sequence: synthetic polynucleotide sequence
  source 1..121: mol_type = other DNA
acaatatgaacatactgcttaccagcaataagaagactatctgtgtcaagactttctgagggatgactcttctgttgctcttcagtgtggacttgaaccgctgtgagtaacacatttataa

SEQ ID NO: 8097 - DNA, 121 bp, synthetic construct
  misc_feature 1..121: note = Description of artificial sequence: synthetic polynucleotide sequence
  source 1..121: mol_type = other DNA
ttaccatctggaacaattccaggagtggactcctgaccgttgacatctttattagctgcctgctctgagaataccatttgatcttcagggccttcaacttccatttcattgttataatctt

SEQ ID NO: 8098 - DNA, 153 bp, synthetic construct
  misc_feature 1..153: note = Description of artificial sequence: synthetic polynucleotide sequence
  source 1..153: mol_type = other DNA
cctgtagtgagctcagctatctccacttcctcacctggctgtaaacgatccatctcagctcccaggtgtttacaatacatgcagatatactcttctttgagctgagtatccagttcatgatctgttggtttgtcacactctaggtgaacccac

SEQ ID NO: 8099 - DNA, 171 bp, synthetic construct
  misc_feature 1..171: note = Description of artificial sequence: synthetic polynucleotide sequence
  source 1..171: mol_type = other DNA
ccttttgcacatattacaatgaagcatgtctttctgcaattctggatgataacacttcccacagaagggacataagttatcctgctgttggtaacaattgtcacatatcaggcaattgtggtgccactgagaactagaccgtgtgccacactctatacatattctgcaatt

SEQ ID NO: 8100 - DNA, 121 bp, synthetic construct
  misc_feature 1..121: note = Description of artificial sequence: synthetic polynucleotide sequence
  source 1..121: mol_type = other DNA
tactttgcatttccagccattggttggtactgatttcataactggttgaagacaaaaagtatgataccctttgtcacacgtatcacacactagcatcttgctatcttctcccgattgtcta

SEQ ID NO: 8101 - DNA, 173 bp, synthetic construct
  misc_feature 1..173: note = Description of artificial sequence: synthetic polynucleotide sequence
  source 1..173: mol_type = other DNA
cttgcagttctggcacactttgcactcaggacattgccaacctgcacgttttaatggagtaaccgctatatccaggcacattccatgatagtgctgaccacaagtagtacaaaagaactgatctaagaggtctcccgggctgtcgcacactgcacagtttgcatcttccttcg

SEQ ID NO: 8102 - DNA, 164 bp, synthetic construct
  misc_feature 1..164: note = Description of artificial sequence: synthetic polynucleotide sequence
  source 1..164: mol_type = other DNA
catctttcaggagcttggtcaatgtgttctggacaaagcaggaagatgtgactgaaatcctgaaaggtgccggctcctgcagcacaaggataatgatacatctgggtacatttctcttcacagcatttgatagtggctccaaggtgcttacaaaatgcacatcg

SEQ ID NO: 8103 - DNA, 121 bp, synthetic construct
  misc_feature 1..121: note = Description of artificial sequence: synthetic polynucleotide sequence
  source 1..121: mol_type = other DNA
acttacttctgtgctccctgagacaacagctttgtccacgttcactaacaatggttcttccatctggcatactcctagtgaccactccacacaacggtgatgagcccaacaagtgcctaaa

SEQ ID NO: 8104 - DNA, 150 bp, synthetic construct
  misc_feature 1..150: note = Description of artificial sequence: synthetic polynucleotide sequence
  source 1..150: mol_type = other DNA
cctgtagaatcaaataaggcttggatatcaatggcatctggaagcccaaccagactgagttcatcccacagtttaccagcttgatcatctgaagctgtctgggtgcttacacttacacaagatactatattctgctgaggagatcgttct

SEQ ID NO: 8105 - DNA, 202 bp, synthetic construct
  misc_feature 1..202: note = Description of artificial sequence: synthetic polynucleotide sequence
  source 1..202: mol_type = other DNA
ctttctctgtcctctttgttttcgtggtgctgagttttgcattttctcataggttccattgctgttgtcatcaatgtccttcttgttagaaggttggtttctccatggcaagataaatccaggcgttattctgaattgttttaagtctccttgtcctaaggaacttttttccccacagtaacaaaaagcgcagagctgttca

SEQ ID NO: 8106 - DNA, 140 bp, synthetic construct
  misc_feature 1..140: note = Description of artificial sequence: synthetic polynucleotide sequence
  source 1..140: mol_type = other DNA
cctgattttggcttctacaccaacagagaccagggagtttgccgattcctcagacacagatcgctgaagagttggaattagctgtttgctgttatccacttctgcttcagcatcctcttctgcagattgttctttgattt

SEQ ID NO: 8107 - DNA, 121 bp, synthetic construct
  misc_feature 1..121: note = Description of artificial sequence: synthetic polynucleotide sequence
  source 1..121: mol_type = other DNA
tcttgagttctgatacctgtttccacaatcgtttctgtttctgttgtctccagcccatccatgctgtcctcatcttccactgcagttttccccctacttcgaggtctacagaaaaaaaaaa

SEQ ID NO: 8108 - DNA, 162 bp, synthetic construct
  misc_feature 1..162: note = Description of artificial sequence: synthetic polynucleotide sequence
  source 1..162: mol_type = other DNA
cttctttctggctctctggaaaggggaagcgccatctttgcgaggccggccccgaggtcttttgtctgcggctgcggggctcggggccggggctccaggctcctcggggggtggtggcggcggctgcggctgctccacgctcttgtcctcctccgacgacat

SEQ ID NO: 8109 - DNA, 121 bp, synthetic construct
  misc_feature 1..121: note = Description of artificial sequence: synthetic polynucleotide sequence
  source 1..121: mol_type = other DNA
tgcaaccactgctgctggtaggctgtgtttcattaccattctgctggctgtcagcatttccatgatacaattagaggcatgtaattcccagaacaaatgagctatttcgaatattgtgaga

SEQ ID NO: 8110 - DNA, 121 bp, synthetic construct
  misc_feature 1..121: note = Description of artificial sequence: synthetic polynucleotide sequence
  source 1..121: mol_type = other DNA
taaaaggattcacggcagagttgaggtttcagcagagtagtggaggacacagcttcttatttgagactttgttttacctaaaaaacacatgtcgcctcaccaaagtggaaaaatctcattt

SEQ ID NO: 8111 - DNA, 121 bp, synthetic construct
  misc_feature 1..121: note = Description of artificial sequence: synthetic polynucleotide sequence
  source 1..121: mol_type = other DNA
aggacgctgttctgagattggtgtagacctttctaatatccggcactttgcagttgaaatggaattcgtgctttgtggtgtcttttctcatatctctttagtgtaaaagtggtagaaatgt

SEQ ID NO: 8112 - DNA, 121 bp, synthetic construct
  misc_feature 1..121: note = Description of artificial sequence: synthetic polynucleotide sequence
  source 1..121: mol_type = other DNA
tttaaagaaaaatcctgcttaaataaatgaggaacacacaggtcatggagatctggctatggaacagtgagttctagtctggagtttggactctggcatgtcccatcctgccacctgaata

SEQ ID NO: 8113 - DNA, 121 bp, synthetic construct
  misc_feature 1..121: note = Description of artificial sequence: synthetic polynucleotide sequence
  source 1..121: mol_type = other DNA
tctgtttaaatgatgtttctcaacttctcatcagagtaggatgaagacagggtatcacttaagcctttggttagtgagttttgtggctgcagcaatctgaactggtacacttcctgctgga

SEQ ID NO: 8114 - DNA, 121 bp, synthetic construct
  misc_feature 1..121: note = Description of artificial sequence: synthetic polynucleotide sequence
  source 1..121: mol_type = other DNA
tagtcctgccgcgggagctctgcacaagccgcagggtcacatgtgaggccatctccaccttcatccctgggcccaggtgcagtctctctgtgccgaagcctctggatttccagcccctgga

SEQ ID NO: 8115 - DNA, 121 bp, synthetic construct
  misc_feature 1..121: note = Description of artificial sequence: synthetic polynucleotide sequence
  source 1..121: mol_type = other DNA
aaggctactggtagggacagtttataacaggggactacatgtcccgcgagagaggccacaagtggcataggttatgcatggagctatggttggcctggaaggtcaccccgaggatctcatc

SEQ ID NO: 8116 - DNA, 121 bp, synthetic construct
  misc_feature 1..121: note = Description of artificial sequence: synthetic polynucleotide sequence
  source 1..121: mol_type = other DNA
cctgtcatgtcctgcacagctctcaggcctttggttgaaaagctgactggaatcacacttgaaaaaagagctcagcctgtggatattagtgacacccaccctggtaggaaatgaacatgta

SEQ ID NO: 8117 - DNA, 121 bp, synthetic construct
  misc_feature 1..121: note = Description of artificial sequence: synthetic polynucleotide sequence
  source 1..121: mol_type = other DNA
aaatcaggctgtagacctgcccgccaggtctgaactgcctgtgaccacagccattcccaggtcttctccgaatggcctcgctgctggcacggtcctcgagggacatgcccctcatccccac

SEQ ID NO: 8118 - DNA, 121 bp, synthetic construct
  misc_feature 1..121: note = Description of artificial sequence: synthetic polynucleotide sequence
  source 1..121: mol_type = other DNA
aatttagtaacaaccttttccctcataattatgctaactgatgtagtgaaatgttgagaaaatcagatattaatggttggctgagctggggcaattaggtggcatttatgagtcttttgtt

SEQ ID NO: 8119 - DNA, 121 bp, synthetic construct
  misc_feature 1..121: note = Description of artificial sequence: synthetic polynucleotide sequence
  source 1..121: mol_type = other DNA
caattacaaacattttaaagaataaatatgatgtggctactccctcataatgtaatgcagttgagttagaaataatataaacaaacatcctcatatacttgaaaataatcaaatgtcaaca

SEQ ID NO: 8120 - DNA, 121 bp, synthetic construct
  misc_feature 1..121: note = Description of artificial sequence: synthetic polynucleotide sequence
  source 1..121: mol_type = other DNA
ctgttttctctcaatgacaaaaatggtgtcatgaagcagtggaaattaggaaactaagatgctttccgcattttgtgtttgctacctcattttcacaaaaagaaattaccagcccctaagt

SEQ ID NO: 8121 - DNA, 121 bp, synthetic construct
  misc_feature 1..121: note = Description of artificial sequence: synthetic polynucleotide sequence
  source 1..121: mol_type = other DNA
atatgtgagtacatttatgaggattccaatttgctggactttctcattggtggtgatcatcttcaacttctgcagatggttttgtacatttctcaaattttctgatgccttaaggatacct

SEQ ID NO: 8122 - DNA, 121 bp, synthetic construct
  misc_feature 1..121: note = Description of artificial sequence: synthetic polynucleotide sequence
  source 1..121: mol_type = other DNA
agaacctaccactttactatggccccagattaagttagatacttctctaccatatcttaaaaatgtacatatgtgtatattactcttctcaccatatactagagacatgattttactttta

SEQ ID NO: 8123 - DNA, 121 bp, synthetic construct
  misc_feature 1..121: note = Description of artificial sequence: synthetic polynucleotide sequence
  source 1..121: mol_type = other DNA
gagaagtattatttagtgaacacccctccaattcagcagaagtgaatagcatacttaaaatcatgaagcaacactgtaaaaattatgggaggacatattttctatgtacagtttgtactta

SEQ ID NO: 8124 - DNA, 121 bp, synthetic construct
  misc_feature 1..121: note = Description of artificial sequence: synthetic polynucleotide sequence
  source 1..121: mol_type = other DNA
actgtggcctggcccacttctacattcattccaagggtccacgtcaaggagttggtaaagaacgcacaatgagtacaggctagttgcaggaacccaccatctctcctactgtcggaagcaa

SEQ ID NO: 8125 - DNA, 121 bp, synthetic construct
  misc_feature 1..121: note = Description of artificial sequence: synthetic polynucleotide sequence
  source 1..121: mol_type = other DNA
acctccttttttcagccaaggatctgtcagtatagtactctgatagcaaaaggtaattattgaagatttactttgactctgacggtgttcggggttcagaatcatgcttgcgcatgtcaga

SEQ ID NO: 8126 - DNA, 121 bp, synthetic construct
  misc_feature 1..121: note = Description of artificial sequence: synthetic polynucleotide sequence
  source 1..121: mol_type = other DNA
ggattctgaagaattgatagaggaatgggaaaattttacagaaataagaaagtcgctaacacaggttaggcttttgccatcctgctgtggatcactggacactgcaaaacatcacttagag

SEQ ID NO: 8127 - DNA, 121 bp, synthetic construct
  misc_feature 1..121: note = Description of artificial sequence: synthetic polynucleotide sequence
  source 1..121: mol_type = other DNA
aatgtgtccacagtcacacgcagacacaaaagaaaatgcacacctaacgcacattcctgtggtccaagacagcatgattccagaggcagcccaaatgctcttggaagagcacccccaggag

SEQ ID NO: 8128 - DNA, 121 bp, synthetic construct
  misc_feature 1..121: note = Description of artificial sequence: synthetic polynucleotide sequence
  source 1..121: mol_type = other DNA
tggacattcacgtgatgaagaatactattgtgtgccaatctaagtagcaggttctaagcacatttcaatgatgttatcatattcttcccttctcagataataatttgaatttttctaaact

SEQ ID NO: 8129 - DNA, 121 bp, synthetic construct
  misc_feature 1..121: note = Description of artificial sequence: synthetic polynucleotide sequence
  source 1..121: mol_type = other DNA
acctatctgttatagatatgtgtatgtatatacttttttattgtttctatctctctggaagactaatacagatgttggtcccatgagaggttctggagaaggagaattttaaggatgagtt

SEQ ID NO: 8130 - DNA, 121 bp, synthetic construct
  misc_feature 1..121: note = Description of artificial sequence: synthetic polynucleotide sequence
  source 1..121: mol_type = other DNA
gtgtgggcctgagtcagggttcactactgtggggaactcgtgagggatttggacagttttggtgaagtgcaggccaccattcttggagattggtggaggtttcttagccttctcggcaaca

SEQ ID NO: 8131 - DNA, 121 bp, synthetic construct
  misc_feature 1..121: note = Description of artificial sequence: synthetic polynucleotide sequence
  source 1..121: mol_type = other DNA
atcatcatcttgctaacactgagccagatttcacatggtgagaactgttctgaaatctcgccttagagtcctgaccacgaagcccttaagagtagtaatattgccaggcgtggtggctcaa

SEQ ID NO: 8132 - DNA, 121 bp, synthetic construct
  misc_feature 1..121: note = Description of artificial sequence: synthetic polynucleotide sequence
  source 1..121: mol_type = other DNA
cactggatcagaagacatctagaaacatagaggcaaaggggtttcaagaccttctttggggacattgagaccaccccaaactgccaagatttgtgatagataagtggacagggagatcatt

SEQ ID NO: 8133 - DNA, 121 bp, synthetic construct
  misc_feature 1..121: note = Description of artificial sequence: synthetic polynucleotide sequence
  source 1..121: mol_type = other DNA
agctggggagggggaggaggtagagtgtggccattgttccagacatctgcctgcctgtgtcaggggacttgcccatgcttgtgtgattttgtaggtttccacacatgctgttcagcaaact

SEQ ID NO: 8134 - DNA, 121 bp, synthetic construct
  misc_feature 1..121: note = Description of artificial sequence: synthetic polynucleotide sequence
  source 1..121: mol_type = other DNA
cagcgccagcccggagtttgcaccttgagcgacaactgtctccaacccctacatctaaatagtaaattcaaaacaaaccataataactgtgattgtaatgatgaaaggagtagaccttggg

SEQ ID NO: 8135 - DNA, 121 bp, synthetic construct
  misc_feature 1..121: note = Description of artificial sequence: synthetic polynucleotide sequence
  source 1..121: mol_type = other DNA
tgccaaaaaggacatctctgggggttacaagagttggcaggtcttttattcccagaaagcctagagctgagagtagcatgagctgccttttccattcctcttcccagataacttgtacctc

SEQ ID NO: 8136 - DNA, 121 bp, synthetic construct
  misc_feature 1..121: note = Description of artificial sequence: synthetic polynucleotide sequence
  source 1..121: mol_type = other DNA
tagtttatcattattcctctttgtgtaggattttgtataagcctaaactcagccaatgaaaacgtatttaagaagtaaggaaatgagacagtgaaggaacaaaacattgcagtgggctaga

SEQ ID NO: 8137 - DNA, 121 bp, synthetic construct
  misc_feature 1..121: note = Description of artificial sequence: synthetic polynucleotide sequence
  source 1..121: mol_type = other DNA
ggaaagagccaaaattaatgaatactctaggctaaaattcaaagttttgaatgtagatgtaagtcagtcaaaactggagagcaaagggatacagtaaatagataaatgagtagtgcttctg

SEQ ID NO: 8138 - DNA, 121 bp, synthetic construct
  misc_feature 1..121: note = Description of artificial sequence: synthetic polynucleotide sequence
  source 1..121: mol_type = other DNA
cttatgaaccctgtgtctcaggactgcatttccaggtctggattggctgcctctaggctgttacacgacagcaaaagccacatctctgttatctatacctctgttatttgatatttcgact

SEQ ID NO: 8139 - DNA, 121 bp, synthetic construct
  misc_feature 1..121: note = Description of artificial sequence: synthetic polynucleotide sequence
  source 1..121: mol_type = other DNA
aaatatttatccattttaaacttgtaactggatgaaagaaaagaaaatctcccatgatattttgtaaccatgaactgagtgtcacatggatttttgcttgaatttatgcttacccacatgt

SEQ ID NO: 8140 - DNA, 121 bp, synthetic construct
  misc_feature 1..121: note = Description of artificial sequence: synthetic polynucleotide sequence
  source 1..121: mol_type = other DNA
gggcagagttagactaatgggtaagagttataggaggagagctccatgaaataaaagcattgagagctgcataaggagaagacaggatgtccttgaaactcggggctctcggggcccatac

SEQ ID NO: 8141 - DNA, 121 bp, synthetic construct
  misc_feature 1..121: note = Description of artificial sequence: synthetic polynucleotide sequence
  source 1..121: mol_type = other DNA
tggcaataatgatagagtctgtctcagaattatacatgtgctaatctggattgtaacatcttaattccagacgtcaagtttccaacaatcaaggagaaaaatgactgtaatccattgacaa

SEQ ID NO: 8142 - DNA, 121 bp, synthetic construct
  misc_feature 1..121: note = Description of artificial sequence: synthetic polynucleotide sequence
  source 1..121: mol_type = other DNA
tttatcttaaaaagaaaataattttgatgctttcacatacagagaataactgaaattggattaacagtagaggtccctggagaaactgcattaatgaatagatataaatgactgtcattag

SEQ ID NO: 8143 - DNA, 121 bp, synthetic construct
  misc_feature 1..121: note = Description of artificial sequence: synthetic polynucleotide sequence
  source 1..121: mol_type = other DNA
ccatgccttttaactaagtttttggcctatcaccctttttccaaccctataaaattataatcgttgctttctaaaatactgctttcatccttctacttaattgaagtattggttttcttgg

SEQ ID NO: 8144 - DNA, 121 bp, synthetic construct
  misc_feature 1..121: note = Description of artificial sequence: synthetic polynucleotide sequence
  source 1..121: mol_type = other DNA
tcagcttttccgtcttctcaaccctggcttctcacccaaggctgcaagactttgctaccgtaagaccagcggttcccaacctttttggcaccagggactggttttgtggaagacagttttt

SEQ ID NO: 8145 - DNA, 121 bp, synthetic construct
  misc_feature 1..121: note = Description of artificial sequence: synthetic polynucleotide sequence
  source 1..121: mol_type = other DNA
gaacacaatcaatgttatttacacattctccacttcgtcatcattattggacttataatggtgacatctgttcagcaaaagtgtggagcccctatgttgtgctagagaccacgtatctagg

SEQ ID NO: 8146 - DNA, 315 bp, synthetic construct
  misc_feature 1..315: note = Description of artificial sequence: synthetic polynucleotide sequence
  source 1..315: mol_type = other DNA
cttaggacatggcagagtctgcattaccttctagatacatgaactttccagagctcaacaagtggtcctcaatcttctgcttggcaagtctctctcccagcgtctccaaggcatccagcagggtgtggacagaggcatctcgcccggttttgttgacccactttatcagcatcgtgtacaaggtgtccctgtggcccgctgcctcagctttagccacctttatctcattgtccatgaggcccaacttcctcatgagcggctcccaggagtcaaagggcaccaagtctgcaaagtcatcgaagcactgtctcagag

SEQ ID NO: 8147 - DNA, 121 bp, synthetic construct
  misc_feature 1..121: note = Description of artificial sequence: synthetic polynucleotide sequence
  source 1..121: mol_type = other DNA
catctccaggagcaaaacacttactctcagtgggatcaccttcatttgctggaaccagcagcctcctcctctgagacctttcagcttctgccggttcctgtaacacatagtggggaatgtc

SEQ ID NO: 8148 - DNA, 157 bp, synthetic construct
  misc_feature 1..157: note = Description of artificial sequence: synthetic polynucleotide sequence
  source 1..157: mol_type = other DNA
ccagcagatgctctgactccccgggggacaacatgttgacacctgttggctctgctggctcctggacttccatttcctgctcagggacctgggtgggctgcaagatactcacgatctcattgaggacattgtcctcagccccaggtcgttgtgagct

SEQ ID NO: 8149 - DNA, 121 bp, synthetic construct
  misc_feature 1..121: note = Description of artificial sequence: synthetic polynucleotide sequence
  source 1..121: mol_type = other DNA
gttcctgaacccctgagcccccagctcctggagaaatcaactcactctgtccacacgctcagggtccccaccaccacctaaaaaagaagcagtctccttagcaggaagggaggggcccatg

SEQ ID NO: 8150 - DNA, 273 bp, synthetic construct
  misc_feature 1..273: note = Description of artificial sequence: synthetic polynucleotide sequence
  source 1..273: mol_type = other DNA
cctgagcagatgcctttcaggtaaggaaggactttcttccacagtaaagacttgcaaacaaacacagccacaatcaagactacggctgcaactgtgactcctatgatgatgcctgagagagaacagggagaggcaggagtccctgggctggaggtcaccgtctcctccacagctgggacttccccactgtgctttgtacctgattctttgtggacacattcgatgtcactccagggtgtacaatcaccgaccttgaccatccctctgggacac

SEQ ID NO: 8151 - DNA, 121 bp, synthetic construct
  misc_feature 1..121: note = Description of artificial sequence: synthetic polynucleotide sequence
  source 1..121: mol_type = other DNA
ctcaccctgtgcggcacttccggcacatctcaggagaatcttcttcccggaaggtgccttcttcgcactgacacactgtgtttctggtcgtggtgcagggacttagctccacttcacctga

SEQ ID NO: 8152 - DNA, 121 bp, synthetic construct
  misc_feature 1..121: note = Description of artificial sequence: synthetic polynucleotide sequence
  source 1..121: mol_type = other DNA
gtacctgaatcacacctggtgcagcgcaagcagaaaaggaggtcattccagtgagtgctatagtcctgtccatatttgcaggagatgcaatctctaccgtcttctgagatatggtgtcctg

SEQ ID NO: 8153 - DNA, 121 bp, synthetic construct
  misc_feature 1..121: note = Description of artificial sequence: synthetic polynucleotide sequence
  source 1..121: mol_type = other DNA
gaacataccaggtggacacaatccctctgaggggctggacctcttttgttgtggggccgctctctgctggggagctaggtcttgttgggtgatcagagcagactcagctgagacctgtggg

SEQ ID NO: 8154 - DNA, 145 bp, synthetic construct
  misc_feature 1..145: note = Description of artificial sequence: synthetic polynucleotide sequence
  source 1..145: mol_type = other DNA
ccaacagcaggaccgcggcgacaacgagcacaagggtcttggggacccggggcccaggcctggctccccgcgcctccctgggtcctgggccgtgccttttccgggcccccgaagcggccggggcgttctgtccccgttgttccat

SEQ ID NO: 8155 - DNA, 121 bp, synthetic construct
  misc_feature 1..121: note = Description of artificial sequence: synthetic polynucleotide sequence
  source 1..121: mol_type = other DNA
ttgctgcagggaattaaggaaccagagagaccgatcagggtgcaggagagtttttattttaggtgtataccggctcagcagacatgtgtcctgaaagtctgagcagcagacaaagaaagca

SEQ ID NO: 8156 - DNA, 321 bp, synthetic construct
  misc_feature 1..321: note = Description of artificial sequence: synthetic polynucleotide sequence
  source 1..321: mol_type = other DNA
ttcactccaaggacacggcagagcctgtgccatcttctaagtagatgaactttccagagtccaccaagaggtcctgaatcttctctcttgcatgtctctcttccatcctctccaaggcatccagcagggtgtggatcgaggcgttccgtccagttttgttgacccatttcatcagcattgcatacaaggcatcccctgggcctgctgtaccagctctgaccacatcgatctcatttttcgtgaggtccagctgcctcatgagctggtcccaggagtcaaagggcacgatgtttgcaaacttgtcaaagaacagcatcagag

SEQ ID NO: 8157 - DNA, 121 bp, synthetic construct
  misc_feature 1..121: note = Description of artificial sequence: synthetic polynucleotide sequence
  source 1..121: mol_type = other DNA
catctccaggagcaaaacacttactctcagtggggtcagcaccatttgctggaaccagcagcctcctcctctgagacccttcagcttctgccggtccctgtaacacacagtggggaatgcc

SEQ ID NO: 8158 - DNA, 184 bp, synthetic construct
  misc_feature 1..184: note = Description of artificial sequence: synthetic polynucleotide sequence
  source 1..184: mol_type = other DNA
ccagcagacactgtgcctcccctggggactgtacagtgacacctgtcaaatctgccggctcctggctttccatttgctgctcagagacgaaagtggacagcgagtctgcgttgctcagaatctcgttgtgagcattgtcctcagccccaggccctcgtaggagacccaagcgccagaaacacac

SEQ ID NO: 8159 - DNA, 121 bp, synthetic construct
  misc_feature 1..121: note = Description of artificial sequence: synthetic polynucleotide sequence
  source 1..121: mol_type = other DNA
ttcctgagcccctgatgcccccagctcctggagaaatcaactcaccctgtccatgcacttggggtcccctccacaacctagaagagaagacggttcccttagtggccagggaggggcccat

SEQ ID NO: 8160 - DNA, 121 bp, synthetic construct
  misc_feature 1..121: note = Description of artificial sequence: synthetic polynucleotide sequence
  source 1..121: mol_type = other DNA
agccagcacctacctgagccgatgcaacaacagacaatcagcacagccaccaacagcaacggaacaaccaaagtcacaaccaaaatcacccatatattatgtccattgcctgagaaaagac

SEQ ID NO: 8161 - DNA, 121 bp, synthetic construct
  misc_feature 1..121: note = Description of artificial sequence: synthetic polynucleotide sequence
  source 1..121: mol_type = other DNA
gggcttccccagtgggctttgtacctgattctttgtggacacactcgatgtcactccagggcgtacaatccttgaccttgaccatccctctggggcacctgggtacacacagggagggagg

SEQ ID NO: 8162 - DNA, 121 bp, synthetic construct
  misc_feature 1..121: note = Description of artificial sequence: synthetic polynucleotide sequence
  source 1..121: mol_type = other DNA
ctcaccctctgctgcacttccggcacatctcagcagaattgtcattccggaaagttcctggtttgcactgacatgctgtgttcctggtcgtggtgcagggacttctctcttcttcatctga

SEQ ID NO: 8163 - DNA, 121 bp, synthetic construct
  misc_feature 1..121: note = Description of artificial sequence: synthetic polynucleotide sequence
  source 1..121: mol_type = other DNA
gtacctgatttacaagctgtacatgggaggcaagcaaacaaattgttggaagcattggtgtaacccacaccctctgtgcaccggttacaggctccaggatgttctgatctatgagatcctg

SEQ ID NO: 8164 - DNA, 121 bp, synthetic construct
  misc_feature 1..121: note = Description of artificial sequence: synthetic polynucleotide sequence
  source 1..121: mol_type = other DNA
cttagaatgtacctggtggacacaactctcccaaagggctatgttcccattgctgtgtgccaattgattgatcatgaagtttgatggttgcagctgagctaggtacgacctgtggggacaa

SEQ ID NO: 8165 - DNA, 307 bp, synthetic construct
  misc_feature 1..307: note = Description of artificial sequence: synthetic polynucleotide sequence
  source 1..307: mol_type = other DNA
cctgcagcaggaccccgacgacgacaaacttgaaggtcttgtggacccggagccgagggctggcttcccgcgccggcctgggtcctggggcgcgccctgcccgggcccgggcactgggtccgtgctgtcccatggaggtagggagcgctcctcggcccccgcctcgtggttcaatcctccccgcggaagagccccacactttgctgggtgtggccgcggctgcctctgtcccactcgctgcgctcccgggattcggagtcactgccaggaacgcacctagatgtactctagctggtggtggcgccat

SEQ ID NO: 8166 - DNA, 121 bp, synthetic construct
  misc_feature 1..121: note = Description of artificial sequence: synthetic polynucleotide sequence
  source 1..121: mol_type = other DNA
catgaacatcattgatcaatgagaggcaatttctgtcaatatcattccaaggtattttcggactggataacagtgatgtagagaggagaaaggggtatgccctcagtcaatcagaagctct

SEQ ID NO: 8167 - DNA, 121 bp, synthetic construct
  misc_feature 1..121: note = Description of artificial sequence: synthetic polynucleotide sequence
  source 1..121: mol_type = other DNA
aatataaatagggaaaatagaaccattcagagcagttcagggatctttactactctgacatggaaggaagaaggaggagaagagaaaagatgaacggaccttgaacctgggatatcgctca

SEQ ID NO: 8168 - DNA, 121 bp, synthetic construct
  misc_feature 1..121: note = Description of artificial sequence: synthetic polynucleotide sequence
  source 1..121: mol_type = other DNA
tcattgtgctcatgaaggcttaggctttaagagtgggaggtggtcttcagaaggtcgaaattaagagagcttttagcagggcctggctgtctacatcctcatatcaaatccaaacagtgca

SEQ ID NO: 8169 - DNA, 121 bp, synthetic construct
  misc_feature 1..121: note = Description of artificial sequence: synthetic polynucleotide sequence
  source 1..121: mol_type = other DNA
aaaaaagaaaagaaaagaaaactaaacaccacaactaagttcccatgtttaccaaagttttattgtgcataattgtttttagccaatattacccatattccaggtgtgctgcatattctaa

SEQ ID NO: 8170 - DNA, 121 bp, synthetic construct
  misc_feature 1..121: note = Description of artificial sequence: synthetic polynucleotide sequence
  source 1..121: mol_type = other DNA
gtgtttcattcatcttagaagtgaaaggtaatgtcctttactaagggaaacatttaagcgagaaagaggcacctccatccccgcactcacccagacttctttcaagtacaatattttaata

SEQ ID NO: 8171 - DNA, 121 bp, synthetic construct
  misc_feature 1..121: note = Description of artificial sequence: synthetic polynucleotide sequence
  source 1..121: mol_type = other DNA
aagctggaactgtatggttatattcacaaattctgggatgtttgttttggctttgtgttataattgcagctacgaaactaaaagtgaacaaattgctttctcatttaatttctttttatca

SEQ ID NO: 8172 - DNA, 121 bp, synthetic construct
  misc_feature 1..121: note = Description of artificial sequence: synthetic polynucleotide sequence
  source 1..121: mol_type = other DNA
gcttttcctttccagtaaacttctccaaacccttcctcagtgtttcaaaggcaacaaaagttatcacaacaaaagtaactagtatttcttgagtgttcacagtgggctggacaagcaaagt

SEQ ID NO: 8173 - DNA, 121 bp, synthetic construct
  misc_feature 1..121: note = Description of artificial sequence: synthetic polynucleotide sequence
  source 1..121: mol_type = other DNA
ttagtacaggctcagtaagggacagctgtattaattgggataatggcaggggagggatatacacaaacttccttatttcttacagacttttcacttagtccccttgtttagttgcatggct

SEQ ID NO: 8174 - DNA, 121 bp, synthetic construct
  misc_feature 1..121: note = Description of artificial sequence: synthetic polynucleotide sequence
  source 1..121: mol_type = other DNA
aatttcagggcccaattttgagaagagggagagaggacagaacactagttacatatcagatcctgccataacaaagaggaaaagtggtgaggttggtttttaagtggtgattagttaaccc

SEQ ID NO: 8175 - DNA, 121 bp, synthetic construct
  misc_feature 1..121: note = Description of artificial sequence: synthetic polynucleotide sequence
  source 1..121: mol_type = other DNA
caggggtgtcaagttctctggcagaagatcaagttccctggctgagcaggcaggctcgactttcgtcaggaatcaaaatcctgttagaatatcaacacatagtggtgatcagagaggatat

SEQ ID NO: 8176 - DNA, 121 bp, synthetic construct
  misc_feature 1..121: note = Description of artificial sequence: synthetic polynucleotide sequence
  source 1..121: mol_type = other DNA
ctgtctctttctctgtactgaggccagaccactgcttcataaataagcaaagaaatgaattgtagtaatgaataatcagcacaagatttttgcaaagactaaagttttattccaatcagtg

SEQ ID NO: 8177 - DNA, 121 bp, synthetic construct
  misc_feature 1..121: note = Description of artificial sequence: synthetic polynucleotide sequence
  source 1..121: mol_type = other DNA
tcctttggaagacacatctctgagctctctgtgaggaggacagcctcattgatgccctcagtgatgtaatttatgttgttggcattgatacagctgaagttaatctgaccgttcttgggga

SEQ ID NO: 8178 - DNA, 121 bp, synthetic construct
  misc_feature 1..121: note = Description of artificial sequence: synthetic polynucleotide sequence
  source 1..121: mol_type = other DNA
tcagaaagtcactaattctcagattcctgtttcttataaaatcgagatgatcagatgggtctcaaggtagatacaaataagagaagtgataatgcctgtcacgaagggaaaatgtcaacaa

SEQ ID NO: 8179 - DNA, 121 bp, synthetic construct
  misc_feature 1..121: note = Description of artificial sequence: synthetic polynucleotide sequence
  source 1..121: mol_type = other DNA
tctgaaggaggagcatgatctgcaagacaggccagcacttggttttcagggtctccccacgatcactgttcctgcacgtacctgtggtctttaatggggtcttctctcctagcaagagttt

SEQ ID NO: 8180 - DNA, 121 bp, synthetic construct
  misc_feature 1..121: note = Description of artificial sequence: synthetic polynucleotide sequence
  source 1..121: mol_type = other DNA
atcttcaacagggacattaggcaatcagaaataagagatttgagccctagccggcagacacctcttgcatctgtggtcacaggtctggggttccttgcagggaagcctcctggagcaggat

SEQ ID NO: 8181 - DNA, 121 bp, synthetic construct
  misc_feature 1..121: note = Description of artificial sequence: synthetic polynucleotide sequence
  source 1..121: mol_type = other DNA
acatcagtatgagctggtcaccttccctgacaacgcagacatgtggggcctgggaaatgaaagagcgccttgggacagggggatttggaaatgtcatccgatggcacaatcaggtaggccc

SEQ ID NO: 8182 - DNA, 121 bp, synthetic construct
  misc_feature 1..121: note = Description of artificial sequence: synthetic polynucleotide sequence
  source 1..121: mol_type = other DNA
gctgtttctgtaggaaacaggtgagcagattgccatcaagcagtgccggcaggagctcagcccccggaaccgagagcggtggtgcctggagatccagatcatgagaaggtgagggcctcgc

SEQ ID NO: 8183 - DNA, 121 bp, synthetic construct
  misc_feature 1..121: note = Description of artificial sequence: synthetic polynucleotide sequence
  source 1..121: mol_type = other DNA
aggctgacccaccccaatgtggtggctgcccgagatgtccctgaggggatgcagaacttggcgcccaatgacctgcccctgctggccatggagtactgccaaggaggagatctccggaagg

SEQ ID NO: 8184 - DNA, 121 bp, synthetic construct
  misc_feature 1..121: note = Description of artificial sequence: synthetic polynucleotide sequence
  source 1..121: mol_type = other DNA
gatgctgcttttcactttcttgacagtacctgaaccagtttgagaactgctgtggtctgcgggaaggtgccatcctcaccttgctgagtgacattggtaaatcccagtcccggaattcagg

SEQ ID NO: 8185 - DNA, 121 bp, synthetic construct
  misc_feature 1..121: note = Description of artificial sequence: synthetic polynucleotide sequence
  source 1..121: mol_type = other DNA
cccccctcttcctcagcctctgcgcttagataccttcatgaaaacagaatcatccatcgggatctaaagccagaaaacatcgtcctgcagcaaggagaacagagggtaagtgacctcctgg

SEQ ID NO: 8186 - DNA, 121 bp, synthetic construct
  misc_feature 1..121: note = Description of artificial sequence: synthetic polynucleotide sequence
  source 1..121: mol_type = other DNA
cttccttttgttttagttaatacacaaaattattgacctaggatatgccaaggagctggatcagggcagtctttgcacatcattcgtggggaccctgcagtacctggtaagaagtgggcct

SEQ ID NO: 8187 - DNA, 121 bp, synthetic construct
  misc_feature 1..121: note = Description of artificial sequence: synthetic polynucleotide sequence
  source 1..121: mol_type = other DNA
cccagagctactggagcagcagaagtacacagtgaccgtcgactactggagcttcggcaccctggcctttgagtgcatcacgggcttccggcccttcctccccaactggcagcccgtgcag

SEQ ID NO: 8188 - DNA, 121 bp, synthetic construct
  misc_feature 1..121: note = Description of artificial sequence: synthetic polynucleotide sequence
  source 1..121: mol_type = other DNA
tttgcaggcattcaaaagtgcggcagaagagtgaggtggacattgttgttagcgaagacttgaatggaacggtgaagttttcaagctctttaccctaccccaataatcttaacaggtaagg

SEQ ID NO: 8189 - DNA, 121 bp, synthetic construct
  misc_feature 1..121: note = Description of artificial sequence: synthetic polynucleotide sequence
  source 1..121: mol_type = other DNA
ctggctgagcgactggagaagtggctgcaactgatgctgatgtggcacccccgacagaggggcacggatcccacgtatgggcccaatggctgcttcaaggccctggatgacatcttaaact

SEQ ID NO: 8190 - DNA, 196 bp, synthetic construct
  misc_feature 1..196: note = Description of artificial sequence: synthetic polynucleotide sequence
  source 1..196: mol_type = other DNA
gctggttcatatcttgaacatggtcacgggcaccatccacacctaccctgtgacagaggatgagagtctgcagagcttgaaggccagaatccaacaggacacgggcatcccagaggaggaccaggagctgctgcaggaagcgggcctggcgttgatccccgataagcctgccactcagtgtatttcagacggcaag

SEQ ID NO: 8191 - DNA, 121 bp, synthetic construct
  misc_feature 1..121: note = Description of artificial sequence: synthetic polynucleotide sequence
  source 1..121: mol_type = other DNA
cagttaaatgagggccacacattggacatggatcttgtttttctctttgacaacagtaaaatcacctatgagactcagatctccccacggccccaacctgaaagtgtcagctgtatccgta

SEQ ID NO: 8192 - DNA, 121 bp, synthetic construct
  misc_feature 1..121: note = Description of artificial sequence: synthetic polynucleotide sequence
  source 1..121: mol_type = other DNA
tcaagagcccaagaggaatctcgccttcttccagctgaggaaggtgtggggccaggtctggcacagcatccagaccctgaaggaagattgcaaccggctgcagcagggacagcgagccgcc

SEQ ID NO: 8193 - DNA, 153 bp, synthetic construct
  misc_feature 1..153: note = Description of artificial sequence: synthetic polynucleotide sequence
  source 1..153: mol_type = other DNA
ggatgaatctcctccgaaacaacagctgcctctccaaaatgaagaattccatggcttccatgtctcagcagctcaaggccaagttggatttcttcaaaaccagcatccagattgacctggagaagtacagcgagcaaaccgagtttgggatca

SEQ ID NO: 8194 - DNA, 121 bp, synthetic construct
  misc_feature 1..121: note = Description of artificial sequence: synthetic polynucleotide sequence
  source 1..121: mol_type = other DNA
ttttgtttttccttctcaattttttttcagcatcagataaactgctgctggcctggagggaaatggagcaggctgtggagctctgtgggcgggtaggagactcattttgggtttcggaact

SEQ ID NO: 8195 - DNA, 121 bp, synthetic construct
  misc_feature 1..121: note = Description of artificial sequence: synthetic polynucleotide sequence
  source 1..121: mol_type = other DNA
cattaggagaacgaagtgaaactcctggtagaacggatgatggctctgcagaccgacattgtggacttacagaggagccccatgggccggaagcaggggggaacgctggacgacctgtgag

SEQ ID NO: 8196 - DNA, 121 bp, synthetic construct
  misc_feature 1..121: note = Description of artificial sequence: synthetic polynucleotide sequence
  source 1..121: mol_type = other DNA
cctcaagtctagacagaacttctttgtatattttagagaggagcaagcaagggagctgtacaggagactaagggaaaaacctcgaggtaagtggggttctgtgtctgccttgggcttctcc

SEQ ID NO: 8197 - DNA, 121 bp, synthetic construct
  misc_feature 1..121: note = Description of artificial sequence: synthetic polynucleotide sequence
  source 1..121: mol_type = other DNA
cctctctccagaccagcgaactgagggtgacagtcaggaaatggtacggctgctgcttcaggcaattcagagcttcgagaagaaagtgcgagtgatctatacgcagctcaggtatgagccc

SEQ ID NO: 8198 - DNA, 149 bp, synthetic construct
  misc_feature 1..149: note = Description of artificial sequence: synthetic polynucleotide sequence
  source 1..149: mol_type = other DNA
gtaaaactgtggtttgcaagcagaaggcgctggaactgttgcccaaggtggaagaggtggtgagcttaatgaatgaggatgagaagactgttgtccggctgcaggagaagcggcagaaggagctctggaatctcctgaagattgcttgt

SEQ ID NO: 8199 - DNA, 121 bp, synthetic construct
  misc_feature 1..121: note = Description of artificial sequence: synthetic polynucleotide sequence
  source 1..121: mol_type = other DNA
aaggtccgtggtcctgtcagtggaagcccggatagcatgaatgcctctcgacttagccagcctgggcagctgatgtctcagccctccacggcctccaacagcttacctgagccagccaaga

SEQ ID NO: 8200 - DNA, 121 bp, synthetic construct
  misc_feature 1..121: note = Description of artificial sequence: synthetic polynucleotide sequence
  source 1..121: mol_type = other DNA
gatcattttctttagtgaagaactggtggctgaagcacataacctctgcaccctgctagaaaatgccatacaggacactgtgagggaacaagaccagagtttcacggtaacagcttgtgtg

SEQ ID NO: 8201 - DNA, 121 bp, synthetic construct
  misc_feature 1..121: note = Description of artificial sequence: synthetic polynucleotide sequence
  source 1..121: mol_type = other DNA
tttttttaacatgtctgttgactttcaggccctagactggagctggttacagacggaagaagaagagcacagctgcctggagcaggcctcatgatgtggggggactcgaccccctgacatg

SEQ ID NO: 8202 - DNA, 121 bp, synthetic construct
  misc_feature 1..121: note = Description of artificial sequence: synthetic polynucleotide sequence
  source 1..121: mol_type = other DNA
agcacacaacaccctgggcttgctcttctccctccatgcagtgctaaggccatatgacttgtgggctgctcctgtcccttattgtgcagtattctgtgggatgagtagaccataacttatt

SEQ ID NO: 8203 - DNA, 121 bp, synthetic construct
  misc_feature 1..121: note = Description of artificial sequence: synthetic polynucleotide sequence
  source 1..121: mol_type = other DNA
aatatattgttgcaaagtcacctaacctgccaaagaaatgaggttgtggtagcaaagctcgacgaatatactacttgtgggaaaaatgcttcagaaggaagatacacaaaaatatttggat

SEQ ID NO: 8204 - DNA, 121 bp, synthetic construct
  misc_feature 1..121: note = Description of artificial sequence: synthetic polynucleotide sequence
  source 1..121: mol_type = other DNA
tgaggggtggtctcctcccttagatgacttattaagtgccaccactaattgttctacattttgtactgacagagactctccttaaccagactttacacaggctctgagtgagctctccttt

SEQ ID NO: 8205 - DNA, 133 bp, synthetic construct
  misc_feature 1..133: note = Description of artificial sequence: synthetic polynucleotide sequence
  source 1..133: mol_type = other DNA
tatgggatgtataaaatcaaaagggaaagacagcttgagtgacgatggagtagatttgaagactcaaccagtacgtaatactgaaagaactatttatgtgagagatccaacgtccaataaacagcaaaggcca

SEQ ID NO: 8206 - DNA, 121 bp, synthetic construct
  misc_feature 1..121: note = Description of artificial sequence: synthetic polynucleotide sequence
  source 1..121: mol_type = other DNA
aaacagaatttttttttctaacaaatattctctcgtaggttccagaatctcagcttttacctggacagaggtttcaaactaaaggtatgttttcatagcaacatagttaaaattttttttc

SEQ ID NO: 8207 - DNA, 121 bp, synthetic construct
  misc_feature 1..121: note = Description of artificial sequence: synthetic polynucleotide sequence
  source 1..121: mol_type = other DNA
atctttagatccagaggaacaaggagacattgtggtagccttgtacccctatgatggcatccacccggacgacttgtctttcaagaaaggagagaagatgaaagtcctggaggagtaagtg

SEQ ID NO: 8208 - DNA, 121 bp, synthetic construct
  misc_feature 1..121: note = Description of artificial sequence: synthetic polynucleotide sequence
  source 1..121: mol_type = other DNA
ttctattctaggcatggagaatggtggaaagcaaagtcccttttaacaaaaaaagaaggcttcatccccagcaactatgtggccaaactcaacaccttagaaacagaagagtgagtcctca

SEQ ID NO: 8209 - DNA, 121 bp, synthetic construct
  misc_feature 1..121: note = Description of artificial sequence: synthetic polynucleotide sequence
  source 1..121: mol_type = other DNA
tcttcacaggtggtttttcaaggatataaccaggaaggacgcagaaaggcagcttttggcaccaggaaatagcgctggagctttccttattagagaaagtgaaacattaaaaggtaggaaa

SEQ ID NO: 8210 - DNA, 151 bp, synthetic construct
  misc_feature 1..151: note = Description of artificial sequence: synthetic polynucleotide sequence
  source 1..151: mol_type = other DNA
ggaagcttctctctgtctgtcagagactttgaccctgtgcatggtgatgttattaagcactacaaaattagaagtctggataatgggggctattacatctctccacgaatcacttttccctgtatcagcgacatgattaaacattaccaaa

SEQ ID NO: 8211 - DNA, 154 bp, synthetic construct
  misc_feature 1..154: note = Description of artificial sequence: synthetic polynucleotide sequence
  source 1..154: mol_type = other DNA
gagcaggcagatggcttgtgcagaagattggagaaggcttgtattagtcccaagccacagaagccatgggataaagatgcctgggagatcccccgggagtccatcaagttggtgaaaaggcttggcgctgggcagtttggggaagtctggatgg

SEQ ID NO: 8212 - DNA, 184 bp, synthetic construct
  misc_feature 1..184: note = Description of artificial sequence: synthetic polynucleotide sequence
  source 1..184: mol_type = other DNA
ggttactataacaacagtaccaaggtggctgtgaaaaccctgaagccaggaactatgtctgtgcaagccttcctggaagaagccaacctcatgaagaccctgcagcatgacaagctcgtgaggctctacgctgtggtcaccagggaggagcccatttacatcatcaccgagtacatggccaagg

SEQ ID NO: 8213 - DNA, 121 bp, synthetic construct
  misc_feature 1..121: note = Description of artificial sequence: synthetic polynucleotide sequence
  source 1..121: mol_type = other DNA
cttgttctttctttctccataggcagtttgctggatttcctgaagagcgatgaaggtggcaaagtgctgcttccaaagctcattgacttttctgctcaggtaacatattcaaaaagccccg

SEQ ID NO: 8214 - DNA, 155 bp, synthetic construct
  misc_feature 1..155: note = Description of artificial sequence: synthetic polynucleotide sequence
  source 1..155: mol_type = other DNA
gattgcagagggaatggcatacatcgagcggaagaactacattcaccgggacctgcgagcagctaatgttctggtctccgagtcactcatgtgcaaaattgcagattttggccttgctagagtaattgaagataatgagtacacagcaagggaag

SEQ ID NO: 8215 - DNA, 133 bp, synthetic construct
  misc_feature 1..133: note = Description of artificial sequence: synthetic polynucleotide sequence
  source 1..133: mol_type = other DNA
ggtgctaagttccctattaagtggacggctccagaagcaatcaactttggatgtttcactattaagtctgatgtgtggtcctttggaatcctcctatacgaaattgtcacctatgggaaaattccctacccag

SEQ ID NO: 8216 - DNA, 204 bp, synthetic construct
  misc_feature 1..204: note = Description of artificial sequence: synthetic polynucleotide sequence
  source 1..204: mol_type = other DNA
gggagaactaatgccgacgtgatgaccgccctgtcccagggctacaggatgccccgtgtggagaactgcccagatgagctctatgacattatgaaaatgtgctggaaagaaaaggcagaagagagaccaacgtttgactacttacagagcgtcctggatgatttctacacagccacggaagggcaataccagcagcagccttag

SEQ ID NO: 8217 - DNA, 121 bp, synthetic construct
  misc_feature 1..121: note = Description of artificial sequence: synthetic polynucleotide sequence
  source 1..121: mol_type = other DNA
agcaaaaagagaggagtcagatccttatacgtattatggagccactaaagcacacctacgctttggccttgttagttgagaaaaagaaacccttcttgaaccactgtaatcagatttacac

SEQ ID NO: 8218 - DNA, 121 bp, synthetic construct
  misc_feature 1..121: note = Description of artificial sequence: synthetic polynucleotide sequence
  source 1..121: mol_type = other DNA
attcagcactgatgggagtctcagtgacctgtaaagcctatgtctctctacacacttcctagtttgctctgcatgagtctctgaccatgcaaatagctatattgtggctatactgtgcaga

SEQ ID NO: 8219 - DNA, 121 bp, synthetic construct
  misc_feature 1..121: note = Description of artificial sequence: synthetic polynucleotide sequence
  source 1..121: mol_type = other DNA
gtatgttccctgatggaaaaggcaggcttgagttcattatcttgagaacaaagatcaaggcaactgcagtagctgcttacctgtgtggccctgtattctctcactgatttttgctccaagg

SEQ ID NO: 8220 - DNA, 121 bp, synthetic construct
  misc_feature 1..121: note = Description of artificial sequence: synthetic polynucleotide sequence
  source 1..121: mol_type = other DNA
cttccctgaattcctcagtggaaagaagaggtgttcagattctcaagtaaggtacagtgctttgtccctctgcatgcccctgtaggaagagaaaaaagacagttccttgttacaggacaac

SEQ ID NO: 8221 - DNA, 153 bp, synthetic construct
  misc_feature 1..153: note = Description of artificial sequence: synthetic polynucleotide sequence
  source 1..153: mol_type = other DNA
cccactactgcagtagtcgttattccagtccaccggttgtgggggaggatttctgcaccccgaacgcacatactccattgcctgggtgacaacttgtgcagctgtagatgtaggattgataatagtctgatagtcgggttgaagagtaaatcc

SEQ ID NO: 8222 - DNA, 388 bp, synthetic construct
  misc_feature 1..388: note = Description of artificial sequence: synthetic polynucleotide sequence
  source 1..388: mol_type = other DNA
cttgctgcatggtgggtgagtgtaaggcagactggacctgcatggggagctggttcccaaggggctgctgcatggtgagcggctggtgctgctgcatgttgagatgctggtgaagaggcgggctgatctggaggggaggaggaggggacacagccatgtttgctatagagacagtcactggcatttggttattcggcttgggggctatgttcctggggagactaggatgcatggcagttaggtgaggattcattcccggttgttggtgatagtgggaacttaggtacagggccgagtgggcctggctgggcccatggaacaccgacggcttcgaattgatcagctgaggaggttgagatgtcttcacgtcaacaggttcactgtagct

SEQ ID NO: 8223 - DNA, 121 bp, synthetic construct
  misc_feature 1..121: note = Description of artificial sequence: synthetic polynucleotide sequence
  source 1..121: mol_type = other DNA
atcacacaactgcacgttaccttggatacaaggctggctctgtatgctgcgagttgcttcaggtactccttcttcgcagcctcggttttctttttatagacctgcaacaacagcaaagagt

SEQ ID NO: 8224 - DNA, 232 bp, synthetic construct
  misc_feature 1..232: note = Description of artificial sequence: synthetic polynucleotide sequence
  source 1..232: mol_type = other DNA
cctgtttttgctcttctcctaaaccgtcccacattgaagccacaattttagagacttcgccaaaggtagcgtttggattttggcccttgatggcggcctgagtatcacgaaagaataacgcataggcagacacaggcttctggggctcattgggatccttcttcttcttctttttgggagtttttggttttttccccatatcagaggcaggccgcttctctccaccattgat

SEQ ID NO: 8225 - DNA, 283 bp, synthetic construct
  misc_feature 1..283: note = Description of artificial sequence: synthetic polynucleotide sequence
  source 1..283: mol_type = other DNA
ccttagaggtatcatcgccttcatcttcatgcactgaactggatggtgaaggagttgcagacttgcttccaggtggagatggtgagttgtggggaacattgcttcctcccatattcaaaccaagttgagcacttagctgtgactggttaatggtagtcagctggccatgtggcatcattcctggctgctgcctgatgtctgcaggctggccccttggtctcatggctgccatctgaggatgggaactgtactgagttccttctgggtttcgtatatctggcat

SEQ ID NO: 8226 - DNA, 121 bp, synthetic construct
  misc_feature 1..121: note = Description of artificial sequence: synthetic polynucleotide sequence
  source 1..121: mol_type = other DNA
ccacagaaatggaattagaaagcagtgttccatcctggcccagcatattggagactgtgatttcagggaggtccatgttttgtggatgaaatggtagcaggccattatggttcatggggtg

SEQ ID NO: 8227 - DNA, 121 bp, synthetic construct
  misc_feature 1..121: note = Description of artificial sequence: synthetic polynucleotide sequence
  source 1..121: mol_type = other DNA
acagagaatggtaaccagactcaacttcattcaggtgcaccagcgagtggtctgggagggaaggaggagtaattggtggaatgttgaagtcttcactttccaggcttggaccagggtagga

SEQ ID NO: 8228 - DNA, 121 bp, synthetic construct
  misc_feature 1..121: note = Description of artificial sequence: synthetic polynucleotide sequence
  source 1..121: mol_type = other DNA
cacctggctggctggcacatagtcctggctcggctctgtcatgctcatatacatgttctcaccgtcaaactgcgaatgaaataatagtaaacattcagcaatcttgactgcgggtatgttt

SEQ ID NO: 8229 - DNA, 121 bp, synthetic construct
  misc_feature 1..121: note = Description of artificial sequence: synthetic polynucleotide sequence
  source 1..121: mol_type = other DNA
gagcgttcaccttgttgcaatagtaggggtccaggcagggagaaggtcccagacagggagcgtcgggcgcagcggcgggctgggctggaggtggataaaatcttacgtccatttcactctc

SEQ ID NO: 8230 - DNA, 121 bp, synthetic construct
  misc_feature 1..121: note = Description of artificial sequence: synthetic polynucleotide sequence
  source 1..121: mol_type = other DNA
cttactaaacaggtaggtgcatgttacagaaacaaaccaagtaggataaactccaaattattagcaatgtttacctctagggttgggatggaatggatagagaatatttgattcattttcc

SEQ ID NO: 8231 - DNA, 121 bp, synthetic construct
  misc_feature 1..121: note = Description of artificial sequence: synthetic polynucleotide sequence
  source 1..121: mol_type = other DNA
ccagattctactgcttttcctcatattcactagtacatctctaacccaagactgttatgttgcaaaccaaaacatgcgtagagcaattgtgatgtgccagcatcctaagaacctcctagca

SEQ ID NO: 8232 - DNA, 121 bp, synthetic construct
  misc_feature 1..121: note = Description of artificial sequence: synthetic polynucleotide sequence
  source 1..121: mol_type = other DNA
tgctcagaaccacgctggttttctcttccccagtgaaatctcacttcgtacagttcaaattcatgcccttgaggcaatggtcctcccgaaagaactgaaaaagaaaatatatgttaccgaa

SEQ ID NO: 8233 - DNA, 121 bp, synthetic construct
  misc_feature 1..121: note = Description of artificial sequence: synthetic polynucleotide sequence
  source 1..121: mol_type = other DNA
gccccagtaactcaacagtttaatattggagtacagagaaatcaatcaatcaatgaaaccgaaaagaaagttcagaaatagattgtcacttgatacttgacaaaggtgtcaatacaaagca

SEQ ID NO: 8234 - DNA, 121 bp, synthetic construct
  misc_feature 1..121: note = Description of artificial sequence: synthetic polynucleotide sequence
  source 1..121: mol_type = other DNA
aattgctccttcccttctagaaacacttttacctcgaggtctcatttttcctttcagactgatctctgttaatttttcttcattggcttatcttttaatatcttcttttactgggttttct

SEQ ID NO: 8235 - DNA, 121 bp, synthetic construct
  misc_feature 1..121: note = Description of artificial sequence: synthetic polynucleotide sequence
  source 1..121: mol_type = other DNA
cagctgggagagaggcttaagctctgccagccaagcttggatctgccagagtggtgggagtgtggacggcatgaccgagacttgctggttggtgctgctaaacacggggtcagtcggacgg

SEQ ID NO: 8236 - DNA, 121 bp, synthetic construct
  misc_feature 1..121: note = Description of artificial sequence: synthetic polynucleotide sequence
  source 1..121: mol_type = other DNA
aaaaggaaagtactttgtactattctttgggtccacgtgcagataaacaggttattcaggcttcctcatctctctcctatacctgggcaaataaatgcatgagtcacccatgggaagagct

SEQ ID NO: 8237 - DNA, 121 bp, synthetic construct
  misc_feature 1..121: note = Description of artificial sequence: synthetic polynucleotide sequence
  source 1..121: mol_type = other DNA
tgaatgaggagaagatgtatacttttgaaatcaaagtatcatctttggcttaaggaatgcgtaattcaactttccttcacatgaattacatattagtgctttgaataacaaaaatattatt

SEQ ID NO: 8238 - DNA, 121 bp, synthetic construct
  misc_feature 1..121: note = Description of artificial sequence: synthetic polynucleotide sequence
  source 1..121: mol_type = other DNA
ggaaactgtgttgttacatgttcagctgcttgtgtttggagcctgagatttcttctgggaaggtcatcctggtgaaaggagcccccggcctgaatgactgcactccctagttggagaggca

SEQ ID NO: 8239 - DNA, 121 bp, synthetic construct
  misc_feature 1..121: note = Description of artificial sequence: synthetic polynucleotide sequence
  source 1..121: mol_type = other DNA
ttctgggaatttgcagatctctgtctaagggagcttttttgtctgccactgagcctaaatgacctgtagaagtgcagaaaccattattggtttgaagacagcaggcctgtcttaagtggaa

SEQ ID NO: 8240 - DNA, 121 bp, synthetic construct
  misc_feature 1..121: note = Description of artificial sequence: synthetic polynucleotide sequence
  source 1..121: mol_type = other DNA
cttgcccaaagtcacagagcaaataagtgacagaataacttttttaaagcaataaagcattgtcatttttgtatatatactatatggtaagagtgcgaagagggtggtccattctacctgg

SEQ ID NO: 8241 - DNA, 121 bp, synthetic construct
  misc_feature 1..121: note = Description of artificial sequence: synthetic polynucleotide sequence
  source 1..121: mol_type = other DNA
gtgaagacccatgaaaatgttcttcggcgcccccatcatctgtatctcgctgcactatcaaaacagaaaggtctgaccactcatttacgcgaatatggacattgcttggatctccgatcag

SEQ ID NO: 8242 - DNA, 121 bp, synthetic construct
  misc_feature 1..121: note = Description of artificial sequence: synthetic polynucleotide sequence
  source 1..121: mol_type = other DNA
agtgggctattgggaatcatgttgaaaggggccattcctgcttccatcccttgagtcccagatccacatattctctgattaaggacacagtgccatttagaggtttctgatttagtgcata

SEQ ID NO: 8243 - DNA, 121 bp, synthetic construct
  misc_feature 1..121: note = Description of artificial sequence: synthetic polynucleotide sequence
  source 1..121: mol_type = other DNA
ccctcatagcaaggcaatgtggcagaaaagtcgactggcttacggtgaaaaaggacgttaatttactaggcattcactcttcatgtaccagttttcctcaaaagtccattaatgtgaattt

SEQ ID NO: 8244 - DNA, 121 bp, synthetic construct
  misc_feature 1..121: note = Description of artificial sequence: synthetic polynucleotide sequence
  source 1..121: mol_type = other DNA
tgtagcactacagtggcaatagctaaccaatacatcatttgtccagtacaagtgttccagtgtatggatccaaacctctcccattatccccttgtacaaaaatgtctaacaaaccttgtcc

SEQ ID NO: 8245 - DNA, 121 bp, synthetic construct
  misc_feature 1..121: note = Description of artificial sequence: synthetic polynucleotide sequence
  source 1..121: mol_type = other DNA
gcatgcaatacagtatgttgaggttaaacatagggtcacacaatcctgctttcatatgagtgacactagcgcattgccatttagtaatttcctgttgccctaatgtatgtgggcgtgtctg

SEQ ID NO: 8246 - DNA, 121 bp, synthetic construct
  misc_feature 1..121: note = Description of artificial sequence: synthetic polynucleotide sequence
  source 1..121: mol_type = other DNA
atggcagggtgaaattgctttgaacgtgagtgtgaaaaaagaaggaaattaagggcaaaccctgtagtacttcaacgctgagacagcagaaagagaagtagacctggcaaaagaagctgag

SEQ ID NO: 8247 - DNA, 121 bp, synthetic construct
  misc_feature 1..121: note = Description of artificial sequence: synthetic polynucleotide sequence
  source 1..121: mol_type = other DNA
tatagcccagtcttcaagaatgtaaccatctaatggaggaagaagatgtataaacaaatatttccatgtagtgtgataagaactataagaggtcacatgttctgtgagtagcaaggaaggg

SEQ ID NO: 8248 - DNA, 121 bp, synthetic construct
  misc_feature 1..121: note = Description of artificial sequence: synthetic polynucleotide sequence
  source 1..121: mol_type = other DNA
atcaaaattttacagcatgaacctctaaatttttggttatgttgctctccattaaagctgagaccagacaataaaataatatcactgaatagcatcatggtttatgacacaattgaagtcc

SEQ ID NO: 8249 - DNA, 121 bp, synthetic construct
  misc_feature 1..121: note = Description of artificial sequence: synthetic polynucleotide sequence
  source 1..121: mol_type = other DNA
aggcacattagcctgaagcagtctcagtcaatgttagttcaaaatttttccagaggccatttgatgcattcagtaaaaccaagagtcaaagaaatttaacttagatttggccattttcccg

SEQ ID NO: 8250 - DNA, 121 bp, synthetic construct
  misc_feature 1..121: note = Description of artificial sequence: synthetic polynucleotide sequence
  source 1..121: mol_type = other DNA
ctttttttttgtaattttggattggttttctgtgtcttagtattttcaggtgctacaacaaatgaccataaactgggcggcctaaataccaaatttagttctcatggttatggaagctgga

SEQ ID NO: 8251 - DNA, 121 bp, synthetic construct
  misc_feature 1..121: note = Description of artificial sequence: synthetic polynucleotide sequence
  source 1..121: mol_type = other DNA
ctctgagtagcttcttacaatattgatggcacactatttgaaaaccttcacttcttgatttctgtggagatacttttttgatgatagtcttatttcactggttgctgttctcacattccac

SEQ ID NO: 8252 - DNA, 121 bp, synthetic construct
  misc_feature 1..121: note = Description of artificial sequence: synthetic polynucleotide sequence
  source 1..121: mol_type = other DNA
gatttgtacatattgttaccaataactgtttaattctttttactgactgataacaacacatggccatcctgttctccagagaacttcctcaagcaagcgggaaccaccttgggtgttcaag

SEQ ID NO: 8253 - DNA, 121 bp, synthetic construct
  misc_feature 1..121: note = Description of artificial sequence: synthetic polynucleotide sequence
  source 1..121: mol_type = other DNA
tcattgagttaaacatgcccttggtttcatgctgaaatcttctgaggggaaaaaaagcagatcacaacattcccattttcatctactttgtacaggataatagccttgagatagaaacatt

SEQ ID NO: 8254 - DNA, 121 bp, synthetic construct
  misc_feature 1..121: note = Description of artificial sequence: synthetic polynucleotide sequence
  source 1..121: mol_type = other DNA
tatacaacctgttcccatgtatatattgtaagacaggtcacactgaactacagtccatgatataaacagtctgtctgtctcagcaagatttgaagttatctaggacagggacacatttttt

SEQ ID NO: 8255 - DNA, 121 bp, synthetic construct
  misc_feature 1..121: note = Description of artificial sequence: synthetic polynucleotide sequence
  source 1..121: mol_type = other DNA
aaggccttactgagaaggtgctgctgcaagacctgaaggaggtgaaggaggaagttgagtgcagaagtatgactggtgggatgtgctgtgaacagcgagctagcccatgtagctggaacag

SEQ ID NO: 8256 - DNA, 121 bp, synthetic construct
  misc_feature 1..121: note = Description of artificial sequence: synthetic polynucleotide sequence
  source 1..121: mol_type = other DNA
ggtagtaaacataggtgttggcgagtgaggaaatgagctatgaaaactaaaagagcaagcctgctttagaaggtgggatgcggaaggcaaaggatatataatcatagattcaggccatcca

SEQ ID NO: 8257 - DNA, 121 bp, synthetic construct
  misc_feature 1..121: note = Description of artificial sequence: synthetic polynucleotide sequence
  source 1..121: mol_type = other DNA
actcagtataatgtattttgttatagcagatgaaataaacgaagacaactgagctgccagtgaaggtttctgaattcatctacttttaaaagtttaacttggggaagactggtctgtctta

SEQ ID NO: 8258 - DNA, 121 bp, synthetic construct
  misc_feature 1..121: note = Description of artificial sequence: synthetic polynucleotide sequence
  source 1..121: mol_type = other DNA
ttttaggtgtgtggggataaggagcagtagaaggggaaagtatcaacaaaatatcgtaagccatgcaatgtaatcccaacatcttcaagagaagtactagaaaaacatcatactgtgaggt

SEQ ID NO: 8259 - DNA, 121 bp, synthetic construct
  misc_feature 1..121: note = Description of artificial sequence: synthetic polynucleotide sequence
  source 1..121: mol_type = other DNA
gtctcaaactcctgaccttaggtgatccacccacatttcttaaaacagtggcctacaccatttcaaatccttactggccagtggtttttcatctacacttcctctcccactgctacattaa

SEQ ID NO: 8260 - DNA, 121 bp, synthetic construct
  misc_feature 1..121: note = Description of artificial sequence: synthetic polynucleotide sequence
  source 1..121: mol_type = other DNA
aaggagacagtctccttttgtttttattcttcccccacacactcagggccgcccatcaggagatgcctttatccagatgaagtctgcggacagagcatttatggctgcacagaagtgtcat

SEQ ID NO: 8261 - DNA, 121 bp, synthetic construct
  misc_feature 1..121: note = Description of artificial sequence: synthetic polynucleotide sequence
  source 1..121: mol_type = other DNA
acatgaaggacagatatgttgaagtctttcagtgttcagctgaggagatgaactttgtgttaatggggggcactttaaatcgaaatggcttatccccaccgccatgtaagttaccatgtaa

SEQ ID NO: 8262 - DNA, 121 bp, synthetic construct
  misc_feature 1..121: note = Description of artificial sequence: synthetic polynucleotide sequence
  source 1..121: mol_type = other DNA
ccatatgtgtatccacattcataatttttttgtgacaaattgcatttgattgtaagttatatacatcataatcctaaccaaaaaaatttagcgaatattttctttttgtttttttttttga

SEQ ID NO: 8263 - DNA, 121 bp, synthetic construct
  misc_feature 1..121: note = Description of artificial sequence: synthetic polynucleotide sequence
  source 1..121: mol_type = other DNA
cattatcgattcaccaaatgtgccaagcatggtgtatgtcgatgaatatgtacttacagaactgacactctagtcagggaacacagtaacatccaagtaaacaagtaaaaacaatttcaag

SEQ ID NO: 8264 - DNA, 121 bp, synthetic construct
  misc_feature 1..121: note = Description of artificial sequence: synthetic polynucleotide sequence
  source 1..121: mol_type = other DNA
gaagcatagtgggaacgggcaggcaataacttcctgagatgcatgtccaaggaacatacatttaaatgaaaaggcaaggatggacagtgacccaccttcggatgggcagatgatcagcata

SEQ ID NO: 8265 - DNA, 121 bp, synthetic construct
  misc_feature 1..121: note = Description of artificial sequence: synthetic polynucleotide sequence
  source 1..121: mol_type = other DNA
tgttgcagcaattgaactgccatgtgcaaaaaagcaagcaaacaaacaaaaggaacatagatcttgtctttacctcataacatgtataaaaattaattgaaaatgtattctaagcctaaat

SEQ ID NO: 8266 - DNA, 121 bp, synthetic construct
  misc_feature 1..121: note = Description of artificial sequence: synthetic polynucleotide sequence
  source 1..121: mol_type = other DNA
ggttttactagtaaaggcacagaggcatgaagcaacatggtgtatgtgggtaactctacgcagctggattagaacaagaatagccgtagttggaatagtttaaggaacaaagaaaaaagac

SEQ ID NO: 8267 - DNA, 121 bp, synthetic construct
  misc_feature 1..121: note = Description of artificial sequence: synthetic polynucleotide sequence
  source 1..121: mol_type = other DNA
gaacaataaagtggaacttggatcagctcaaaaatatttaggatgatagcctaccgtattggggaaaagaaatacatagccacatagaaaaattatgttttcagttttaaacttttttctt

SEQ ID NO: 8268 - DNA, 121 bp, synthetic construct
  misc_feature 1..121: note = Description of artificial sequence: synthetic polynucleotide sequence
  source 1..121: mol_type = other DNA
gctctctagacttgtatgtgctggctgttttctgggctcaagttcatgccatgattgtctgacccatcttccctggagaggcagatttcttccattccagtctttaatcattatctgtgtt

SEQ ID NO: 8269 - DNA, 214 bp, synthetic construct
  misc_feature 1..214: note = Description of artificial sequence: synthetic polynucleotide sequence
  source 1..214: mol_type = other DNA
tctacacaaaaccaaaattcttggtcttaatggcgagtaacaatttctgtttgagaatctgtttagaggaatagagtgggacgtaaagtcgagaaatgcaagtatttgcagtaggaagatgttggtcatctggtggtcttattgtgattgagggcataggctggaatccttcttcactggctggcagtgatgggcttgatgtccaaaagtaaac

SEQ ID NO: 8270 - DNA, 121 bp, synthetic construct
  misc_feature 1..121: note = Description of artificial sequence: synthetic polynucleotide sequence
  source 1..121: mol_type = other DNA
gtgaaatttttaacttacaagatcttgtcgttctgtcatgctcatcttctctactattgaccagaaccaacgcttgaactgcagaagcttctcagcattttctcctaagaatgaagaatgt

SEQ ID NO: 8271 - DNA, 146 bp, synthetic construct
  misc_feature 1..146: note = Description of artificial sequence: synthetic polynucleotide sequence
  source 1..146: mol_type = other DNA
cctgattcatcattgaaagaggtaaaactgatcagcatttgcacattgacttcaccgcagccatttaccaaaagcctaaaatcttctgccgttaaatcttctaatgaattttttggaagcacatctagtagacctttcctcattgc

SEQ ID NO: 8272 - DNA, 121 bp, synthetic construct
  misc_feature 1..121: note = Description of artificial sequence: synthetic polynucleotide sequence
  source 1..121: mol_type = other DNA
ttacatgtaagggctgttctgcaactaccaacattctgtgttctgcgtatttccgcacatactcatatacattctgtggagtgactggtatatttacaccattaggaatgagttcaacctg

SEQ ID NO: 8273 - DNA, 157 bp, synthetic construct
  misc_feature 1..157: note = Description of artificial sequence: synthetic polynucleotide sequence
  source 1..157: mol_type = other DNA
cctgtcctccaccttcttctttacacaggtcaattgcaaatgccaaatccattgctgagaaaacagcatcagcatctgaactctgagacgcgaggattagttgccgcaaactctcatacattacaggatcaaaaaaagcaaaatcatgccaattgac

SEQ ID NO: 8274 - DNA, 121 bp, synthetic construct
  misc_feature 1..121: note = Description of artificial sequence: synthetic polynucleotide sequence
  source 1..121: mol_type = other DNA
ttcatcaaaatcacttacttttctaccaagcaatactttaattacatgtctattcaatgtgataggacatagttcattctgtaacagacatagtccaagaatcctaaaaacaaacacagag

SEQ ID NO: 8275 - DNA, 180 bp, synthetic construct
  misc_feature 1..180: note = Description of artificial sequence: synthetic polynucleotide sequence
  source 1..180: mol_type = other DNA
cctgccaatgtttctgaaacaattcaaccttgcttctgtgttcttgccaggccttggagtataaaatcctcttttcccaggttggtaaaacaaaggggcattgtcatcaccatcatctgtatcatctaaatccatatctactacacttcgactagagccatggcgctttcggttttcctg

SEQ ID NO: 8276 - DNA, 121 bp, synthetic construct
  misc_feature 1..121: note = Description of artificial sequence: synthetic polynucleotide sequence
  source 1..121: mol_type = other DNA
ttatcagcacatgaataaaatgttccttacctgtaccttttctgaggagtctactaatccaagatccaggatactatcagctccattttccctaaaaacaaaaagcctttcacattccaga

SEQ ID NO: 8277 - DNA, 121 bp, synthetic construct
  misc_feature 1..121: note = Description of artificial sequence: synthetic polynucleotide sequence
  source 1..121: mol_type = other DNA
atgtgcaataatgagttccatggcctcatccactcttgctctcagagaatcctcacttgctagaaggagaagcagctgagctggggataattccaacaacatgccagtgattttacttgca

SEQ ID NO: 8278 - DNA, 146 bp, synthetic construct
  misc_feature 1..146: note = Description of artificial sequence: synthetic polynucleotide sequence
  source 1..146: mol_type = other DNA
ctggttgcattgcttgtacacgaggataaagcctctctccaagtgcctgccgatgtgctggcaaaggctcaggatcatcgctaggattcccttcagaggctggtctaaagggcctagtgtcgatggaaagctgtcttctaaagtct

SEQ ID NO: 8279 - DNA, 121 bp, synthetic construct
  misc_feature 1..121: note = Description of artificial sequence: synthetic polynucleotide sequence
  source 1..121: mol_type = other DNA
tttacctatcccggtccctccgagaacctgctcgcaaaccactactcctcctcatttccctttctctctccctttcccggtctctctctcctcggttccttaatctctgcattaaacctag

SEQ ID NO: 8280 - DNA, 121 bp, synthetic construct
  misc_feature 1..121: note = Description of artificial sequence: synthetic polynucleotide sequence
  source 1..121: mol_type = other DNA
cttgtgtgggtgcctttgttggcattttggatacactctagatttggcaatttttcatttgataaaaatgcttgtgcaatggctgtataaaaacttcgtgctacaccactgccctctcctg

SEQ ID NO: 8281 - DNA, 121 bp, synthetic construct
  misc_feature 1..121: note = Description of artificial sequence: synthetic polynucleotide sequence
  source 1..121: mol_type = other DNA
catccttaaatgtgacttttactctgtgtacagccattggtgtagtagcacatcttcgaccaaagtgattgttaagctgcctcatagtctgctgaatgagaagatctcgatcccgatcaac

SEQ ID NO: 8282 - DNA, 121 bp, synthetic construct
  misc_feature 1..121: note = Description of artificial sequence: synthetic polynucleotide sequence
  source 1..121: mol_type = other DNA
aatacctttacctctagtgacaaatctcttgactgctggtttctcagtttttccatttctctgcggaattttgattcttttacctcaaaaccacccaattcagttaggatcttaaaaaaaa

SEQ ID NO: 8283 - DNA, 121 bp, synthetic construct
  misc_feature 1..121: note = Description of artificial sequence: synthetic polynucleotide sequence
  source 1..121: mol_type = other DNA
tgatccaggttctgctccaacatcttccatgaataccctgccgaacagttctaaagaaaggcgccaacgtcctagcagcatatcatgggaaataaccattcccataaagctacactgtggc

SEQ ID NO: 8284 - DNA, 278 bp, synthetic construct
  misc_feature 1..278: note = Description of artificial sequence: synthetic polynucleotide sequence
  source 1..278: mol_type = other DNA
cctgaaagatgtgagaggtggcccttcactttcagtaagtcctatttctgctagtaagctactttttaattgtgcagcaagatcatgagcagatggccctggttttgaactctcagtttcttctggcagcacgggctgttcttccccttcttttttttgccggttttgcatgttcattacatttttcagattggcagcataagacatttttgttggaagaacctatgaatatttacatttaaaagttacaaatgaagggaaaaaaactaattagattt

SEQ ID NO: 8285 - DNA, 121 bp, synthetic construct
  misc_feature 1..121: note = Description of artificial sequence: synthetic polynucleotide sequence
  source 1..121: mol_type = other DNA
ttacctctaggcagtttctatccactgtaacctccattaaacatttcccactactggcagatgaagaataaagaccctgacttggacggccaaaaagatcctcctttctagcatttggctg

SEQ ID NO: 8286 - DNA, 174 bp, synthetic construct
  misc_feature 1..174: note = Description of artificial sequence: synthetic polynucleotide sequence
  source 1..174: mol_type = other DNA
cctgcaacagatgtggctgatcagccaaggggatggcttcagccagaggcacttcaaatggatttgggggtatacacccaaggaatgtcatggagtctgaacgtcggaaaaatggatggttttggccagtttctgcaggaagagagtcatcatccttatcattcaaagtagcac

SEQ ID NO: 8287 - DNA, 121 bp, synthetic construct
  misc_feature 1..121: note = Description of artificial sequence: synthetic polynucleotide sequence
  source 1..121: mol_type = other DNA
ttagcagattttctgtgcactaactttgattggtgtcatcatcattttcatgttctgaatcttcattatcaatacccagttccaagagttctcgcgtcctttaaaaagacaagtgagtcat

SEQ ID NO: 8288 - DNA, 232 bp, synthetic construct
  misc_feature 1..232: note = Description of artificial sequence: synthetic polynucleotide sequence
  source 1..232: mol_type = other DNA
ccttttgcgttctagttgaggtgtatccaatgttgtctgctgattcattgccttaatccagtatataagtgcttgaaaaacatatgccacatgcttcaatgagcaaacatccaaaactggaagaacatcagaatgctcatcattatgagaccgcattagagacagagcataatttaggaagtctcctcgtgcagacatcattccttgacgggcgctaagcaaggtggcacgt

SEQ ID NO: 8289 - DNA, 213 bp, synthetic construct
  misc_feature 1..213: note = Description of artificial sequence: synthetic polynucleotide sequence
  source 1..213: mol_type = other DNA
ccgtctgccttcaagtgttcgtaagctagcttcttctcgcgcagtcatcctctctcttctcgctgaattctgagaagcgtgaagaggatgatttggatgtccaggatcaccagcagatgctaatgcagaaccataacgtaattgagcttcagtagaatccataatactgaccatccagttccaagtgggaataagcttttcttctacatagtt

SEQ ID NO: 8290 - DNA, 270 bp, synthetic construct
  misc_feature 1..270: note = Description of artificial sequence: synthetic polynucleotide sequence
  source 1..270: mol_type = other DNA
cctgtaagtttactgcatcttggtaagtcaatttcacagctgctggaatctgagagtatactaggtgattatacttaggaataaggcccatcaagtccgagatttgtctaatgacaatgctgtaagccctggctaaactgcttgcagatgttaggtaactgctggcgttgctagcttccaaagcagctgctgcagctgcagcacttgtactgatggtaccactccggcgtaagtttgaaggatcaatataaatcaaacccgctgaacttg

SEQ ID NO: 8291 - DNA, 259 bp, synthetic construct
  misc_feature 1..259: note = Description of artificial sequence: synthetic polynucleotide sequence
  source 1..259: mol_type = other DNA
cctgctggtgtagatgtactggaaggggctgtactggctgctcgctgatgctgggtgttgcggacagcccactgcattgaacggggagcttgggcagcaccattggcatgggagctatttgtggttctttctaatggctcatcaagcataaaggtctcctgttctatgtcgtcactctgactactactgctatcagaatcacttgagtcattcgattgagaatcatcttcagaaaagaaggcaggaacactgcttgctc

SEQ ID NO: 8292 - DNA, 133 bp, synthetic construct
  misc_feature 1..133: note = Description of artificial sequence: synthetic polynucleotide sequence
  source 1..133: mol_type = other DNA
cctgcttctgaaccagcagttgctgcagtgacaacgcttctgcgcccactagcattatcttggttgctgtggttactttcactatcactttctgtttcagctgctgctaacaagtccagctccatatcactcc

SEQ ID NO: 8293 - DNA, 121 bp, synthetic construct
  misc_feature 1..121: note = Description of artificial sequence: synthetic polynucleotide sequence
  source 1..121: mol_type = other DNA
cataccgtcttcatcatgctcatcatgttgtccctctgcctcagcattttcttccccgtgttcttcctgttcatcatgatgatcctcttctccagccacaccctccaccacctcaacctaa

SEQ ID NO: 8294 - DNA, 121 bp, synthetic construct
  misc_feature 1..121: note = Description of artificial sequence: synthetic polynucleotide sequence
  source 1..121: mol_type = other DNA
tcttccacatctgctgaaacaatatcatcctgttcttcatctctgccccgaacgggctgtgactggctgatgcgcctctgctgtggattcctgatgatgtaggatgactgagactgactgg

SEQ ID NO: 8295 - DNA, 241 bp, synthetic construct
  misc_feature 1..241: note = Description of artificial sequence: synthetic polynucleotide sequence
  source 1..241: mol_type = other DNA
cctgctagactgatcagatgatggtcgtggtggtagtggttccactgaaaataattcttcactgccctgcatggcatctatgctagtactagccagggtaaatggtgcagttggacgagcaatccccattctgacaggaacaatcagtgactctgctacgttgcacaattcttccacagcgtaaggtagcaatgcttggaatacacgcttgcattttccaattggctgtggaataaagttg

SEQ ID NO: 8296 - DNA, 162 bp, synthetic construct
  misc_feature 1..162: note = Description of artificial sequence: synthetic polynucleotide sequence
  source 1..162: mol_type = other DNA
ctttttctttttggatgaagccatttccacactcagaataacaaaaactcttgccactgaacgtagaaacctcattgtcacagcaatagcttcttctctacgtccaggtgtatatttgttttggagttctttcactagtgtacctagtagagtatctaaaag

SEQ ID NO: 8297 - DNA, 121 bp, synthetic construct
  misc_feature 1..121: note = Description of artificial sequence: synthetic polynucleotide sequence
  source 1..121: mol_type = other DNA
atatctgctgtacacttaactataaggcaatgagtgaaacagtccagccgaattgtgccactttgctgattgaggtatacttgctcttctggcaaaagatggcctattctactgctggcac

SEQ ID NO: 8298 - DNA, 121 bp, synthetic construct
  misc_feature 1..121: note = Description of artificial sequence: synthetic polynucleotide sequence
  source 1..121: mol_type = other DNA
tctttattctcctgcgacccaaacataatcatagatttcaaggcattccagtcctgtagaacacgctccaatgcaagctgggcaaatcttggaggctctaaatcatgatctggcatatctg

SEQ ID NO: 8299 - DNA, 121 bp, synthetic construct
  misc_feature 1..121: note = Description of artificial sequence: synthetic polynucleotide sequence
  source 1..121: mol_type = other DNA
ccttcaggactggctgtttttcggttacgatcttccctgattcgaggtggcctgtattgacaatgctccaccgtctgccttgcgactgtctgtactaagaatagtaagaggtgctctcccc

SEQ ID NO: 8300 - DNA, 148 bp, synthetic construct
  misc_feature 1..148: note = Description of artificial sequence: synthetic polynucleotide sequence
  source 1..148: mol_type = other DNA
cctgctgtttggcagagtaaccagattagtagcagtgagcaggcgataaagtagatcaagacgagcagatttctgtccagcaataagagttttacatttacatttctcccaacaatcacagtaggctgttggtgatgtccgtttgagt

SEQ ID NO: 8301 - DNA, 121 bp, synthetic construct
  misc_feature 1..121: note = Description of artificial sequence: synthetic polynucleotide sequence
  source 1..121: mol_type = other DNA
tagaattgtactcacttgcaatcatgacctttatgacaaacccttgcacattccgtacaacaacacagtgactccagcaagccacaagttcgacactcaaaaatatcctaaaattaagagt

SEQ ID NO: 8302 - DNA, 150 bp, synthetic construct
  misc_feature 1..150: note = Description of artificial sequence: synthetic polynucleotide sequence
  source 1..150: mol_type = other DNA
cctggttaatgtgctctgctccagtccatgtaaaactgcaagtgtcattacaacataaaacatataaaggagagtcatcagggttggtacctgatgggcaaaccattcccatgaatacatcttcctctttttcacttgaggatatttcag

SEQ ID NO: 8303 - DNA, 121 bp, synthetic construct
  misc_feature 1..121: note = Description of artificial sequence: synthetic polynucleotide sequence
  source 1..121: mol_type = other DNA
gaaataaattaccttttgcaattttctgagcagtttctaagatggtaattgcagcaggataagctcggccacttacagctgacataaatggggtcatccctcttgcatccctaaaataaga

SEQ ID NO: 8304 - DNA, 121 bp, synthetic construct
  misc_feature 1..121: note = Description of artificial sequence: synthetic polynucleotide sequence
  source 1..121: mol_type = other DNA
tggcagaaagaagttctcgtagatagggctggagaaccacactgtcacataacaatttcaatataaaatgagcattcgcctttcgatccttggattctactacagatggctctgtggaagg

SEQ ID NO: 8305 - DNA, 121 bp, synthetic construct
  misc_feature 1..121: note = Description of artificial sequence: synthetic polynucleotide sequence
  source 1..121: mol_type = other DNA
tacagattcttacctggaatagtggaggtgcttggtccttgaccagtaccggttgctgctgtggtaagagatcccacagcgggggccaggataaaatcaatgtcaccatctttcagtaaac

SEQ ID NO: 8306 - DNA, 153 bp, synthetic construct
  misc_feature 1..153: note = Description of artificial sequence: synthetic polynucleotide sequence
  source 1..153: mol_type = other DNA
ccaggatccatcgcaggagggtcaggaacccaactagggggagctatggggggtgaaactggatcctggtggtcactggatgaagctccagcttcatgtctacccaaaccagctgctctcaacgaacgtctcatcatttcccgtaatctcaaa

SEQ ID NO: 8307 - DNA, 121 bp, synthetic construct
  misc_feature 1..121: note = Description of artificial sequence: synthetic polynucleotide sequence
  source 1..121: mol_type = other DNA
cggctacttgatgatccagcccgattacctgggccattacttgaaacaactgatattgcatttgcaatggcctcaacagcagaaagcctttctgcaaatgtatttctttcagaacgctccg

SEQ ID NO: 8308 - DNA, 212 bp, synthetic construct
  misc_feature 1..212: note = Description of artificial sequence: synthetic polynucleotide sequence
  source 1..212: mol_type = other DNA
ccctcttcttctttagtttctttattgctggttggaaagcaaactgatacacaagcatgcaaaatatttcgatttccatcacatctgtggctgatgaatgtctgcagcatctgtagattctgctctaaaacaaccgcttgctcaagattcattagatattgtcgacaggcctcatagtcacagcgcagaatgtgttgcattaaggtttgttt

SEQ ID NO: 8309 - DNA, 199 bp, synthetic construct
  misc_feature 1..199: note = Description of artificial sequence: synthetic polynucleotide sequence
  source 1..199: mol_type = other DNA
cctctacagccatgatgataacagcagctttctttttgattgttgaattggcaggaagatttattaaagaatgcacacccattccaagactactaataggtggaagatccagccaatcgggatcccttattcctcccatgcaatctttggccattgggtagatggtaccatttccatctcgaagaataatgggagattc

SEQ ID NO: 8310 - DNA, 156 bp, synthetic construct
  misc_feature 1..156: note = Description of artificial sequence: synthetic polynucleotide sequence
  source 1..156: mol_type = other DNA
cctgtccagcagtgaaaatggctacattcctctcattctgaccaaggaaagcaatgctgcttgtaggaaaattattttcctgttctgcttttcctgtagcaagatcaaagatacagtatcgtacccaatttccagtcttcagaacagcatgaacac

SEQ ID NO: 8311 - DNA, 121 bp, synthetic construct
  misc_feature 1..121: note = Description of artificial sequence: synthetic polynucleotide sequence
  source 1..121: mol_type = other DNA
tttacctttggaatctacattcactgctaatatttctgttttttcaggtatacaaagctttttaggagtcctttggaaacagtcgggaaccttcggtgttccaccagttttgacaacctgc

SEQ ID NO: 8312 - DNA, 145 bp, synthetic construct
  misc_feature 1..145: note = Description of artificial sequence: synthetic polynucleotide sequence
  source 1..145: mol_type = other DNA
cctgcaattcatcaattctaagtaacctacaatcctgcaggagagaagaagggtcagcatctggaccagagctgttctgacagttagtattactggaggttcctggaaattttacagcaacataggcaccatctacttttagcac

SEQ ID NO: 8313 - DNA, 121 bp, synthetic construct
  misc_feature 1..121: note = Description of artificial sequence: synthetic polynucleotide sequence
  source 1..121: mol_type = other DNA
aaaccttgccaacaggaacattcttgacatcttccacaaaaaccacttcccgaagagaccactgctcttcattcaccttttcctcttcttttggtgcaggggttgaccgtcgtcgttctta

SEQ ID NO: 8314 - DNA, 121 bp, synthetic construct
  misc_feature 1..121: note = Description of artificial sequence: synthetic polynucleotide sequence
  source 1..121: mol_type = other DNA
acttactgtatggcattgatgcactgctggcaattgaggatgcatcactacacgtggatgctggagatggtggaggacccatttctgttttcactggctcctgcttactttcaggcctgag

SEQ ID NO: 8315 - DNA, 186 bp, synthetic construct
  misc_feature 1..186: note = Description of artificial sequence: synthetic polynucleotide sequence
  source 1..186: mol_type = other DNA
cttagcttcagtagttttgctagctttttccatgtttttcaagctttcaggagatctaagttgaaatctacagctgtcattcatattccaaactgactccattaagacaccaactttaggaatcccagcactaattgaaaatgcaactgctccagcatgataaagaggattatttctcaagcatac

SEQ ID NO: 8316 - DNA, 121 bp, synthetic construct
  misc_feature 1..121: note = Description of artificial sequence: synthetic polynucleotide sequence
  source 1..121: mol_type = other DNA
acctgggtaccaacagtgatgttcggcattgaagaaataccagcactggatttaggctttttattttttgctctagctttctctaacattttcttcctttgactaaaaggaactacacccc

SEQ ID NO: 8317 - DNA, 156 bp, synthetic construct
  misc_feature 1..156: note = Description of artificial sequence: synthetic polynucleotide sequence
  source 1..156: mol_type = other DNA
ccaccaatataaactgttttccagctgagcgcaggtgtaaagggcacagcaatgtaaagaaactatccgctctccttgaagttcagagtaagtctgagcagtgtgctctaatttagaagccacagaacttaaagtttcatccacccatgtagcaac

SEQ ID NO: 8318 - DNA, 121 bp, synthetic construct
  misc_feature 1..121: note = Description of artificial sequence: synthetic polynucleotide sequence
  source 1..121: mol_type = other DNA
cataccttgttattttctgtagctacagttgctcttatgctatttgcagacaggaggactatcttttcattggttaaccccaaaaatgttgctcgtggatgatgtaatgaaggattctttg

SEQ ID NO: 8319 - DNA, 121 bp, synthetic construct
  misc_feature 1..121: note = Description of artificial sequence: synthetic polynucleotide sequence
  source 1..121: mol_type = other DNA
acctgggcatttctgtaaggctcagattcactccatttccactgataaagttctcctttactgctgacagccagaagttcagaatacagagccccaatacagatgaattttgttccatcct

SEQ ID NO: 8320 - DNA, 213 bp, synthetic construct
  misc_feature 1..213: note = Description of artificial sequence: synthetic polynucleotide sequence
  source 1..213: mol_type = other DNA
ccttatcaggccaccactgcaaatcttctcctagagatactggactttgaacaggtgtattcttcttatccaagtttggctctccttccttgctggtagaacccctttcattatcaaatgaggctccatcaagccaccttcgttcacgtaaacgtaaaacggattcacgttcacgcaacagctcagagtctctctctaagggaagaaggagaa

SEQ ID NO: 8321 - DNA, 151 bp, synthetic construct
  misc_feature 1..151: note = Description of artificial sequence: synthetic polynucleotide sequence
  source 1..151: mol_type = other DNA
cctcgagatgagcctagcctggaaagtgatgaacgacgaaaagaagggtaaccaaaatagctaatgtcttcagaaaacatggcatctgcatcaataatgacacttgggtgggcagaatgaatgtcggcatcaaggagagacataagatcct

SEQ ID NO: 8322 - DNA, 161 bp, synthetic construct
  misc_feature 1..161: note = Description of artificial sequence: synthetic polynucleotide sequence
  source 1..161: mol_type = other DNA
cctccaggcaaataagattcgctggctgtatcatccccatcatctccatcttcatcatcccggctaagtaaattatttacagcaaggttcacatcaagatttgttctctgaagttctcgaataatgacacttctggatttgccttgtaaaacaacttgggc

SEQ ID NO: 8323 - DNA, 191 bp, synthetic construct
  misc_feature 1..191: note = Description of artificial sequence: synthetic polynucleotide sequence
  source 1..191: mol_type = other DNA
cctgtgaaatcagctcctctggaatgacagatgctggaataactggctggggctgactgcccaaaagcccagaccctcgatcccgtcctgtccgaataactcgagtctgccggcgggaatctcgagctccagctgatgacctaccagaggatcctccaccacttccacccactccagaactccagcggctt

SEQ ID NO: 8324 - DNA, 121 bp, synthetic construct
  misc_feature 1..121: note = Description of artificial sequence: synthetic polynucleotide sequence
  source 1..121: mol_type = other DNA
ccctaaggtgttgcctgccagcctgcctagagtctcagaacctgagagaaaccatggagagtcgcttgtcctaccaggccttgacgtcctccctgcccccgagttgctgttcaactttgac

SEQ ID NO: 8325 - DNA, 121 bp, synthetic construct
  misc_feature 1..121: note = Description of artificial sequence: synthetic polynucleotide sequence
  source 1..121: mol_type = other DNA
tagaaaggacataatatcttacccatcattattatcaggtttacccaattccaatctgtctggctgtactgaaaaaccaatcctgcaaactctaccatcctaaaagcaaagaaaacagaaa

SEQ ID NO: 8326 - DNA, 121 bp, synthetic construct
  misc_feature 1..121: note = Description of artificial sequence: synthetic polynucleotide sequence
  source 1..121: mol_type = other DNA
tcttagagtgaataatttacctcaagaagaaaggcagcatgatttggtcccaccacacactgtttaatagtagcctgttccaatacattcaaaggggggtggctgagagataaaaaaagaa

SEQ ID NO: 8327 - DNA, 121 bp, synthetic construct
  misc_feature 1..121: note = Description of artificial sequence: synthetic polynucleotide sequence
  source 1..121: mol_type = other DNA
attgttgtcagaagatttaaatattttaaaactcttacctgtttaaattatatttgttcagcttctcagaaacttctcgtaacctttaaaacaaaacattaacaaaccacgtgtacagatc

SEQ ID NO: 8328 - DNA, 121 bp, synthetic construct
  misc_feature 1..121: note = Description of artificial sequence: synthetic polynucleotide sequence
  source 1..121: mol_type = other DNA
ccgcgcccgccgacccgccagccctattacctgtcattgagctggtcctcggtgcccggcagcgggtgaaccacgaaatggatggacgtcatggtgctttccttctcgtcctccactcgag

SEQ ID NO: 8329 - DNA, 121 bp, synthetic construct
  misc_feature 1..121: note = Description of artificial sequence: synthetic polynucleotide sequence
  source 1..121: mol_type = other DNA
taatgatagcaatgacctttcacagtagtaaggagtgagcatgcggcagggttgcaatcggaatgaagctcaggactctgacagttgtggagtggacagtctctcatcagctgtaactcag

SEQ ID NO: 8330 - DNA, 121 bp, synthetic construct
  misc_feature 1..121: note = Description of artificial sequence: synthetic polynucleotide sequence
  source 1..121: mol_type = other DNA
ttttgtcagtcttaagatctctattttaatgtgaatgctagtcaaatgtttctaaactctaaaacggagaaggtataatgaggcatgtctaaccctgtcacccccactgtggcctgaacta

SEQ ID NO: 8331 - DNA, 121 bp, synthetic construct
  misc_feature 1..121: note = Description of artificial sequence: synthetic polynucleotide sequence
  source 1..121: mol_type = other DNA
gtgggacaaagaattcccagagttctttctaacgggataacctcagagaaggaactgttgctgttagcattaattggatcagttagccagaccattgtcaatagcccgagagtctgtaaaa

SEQ ID NO: 8332 - DNA, 121 bp, synthetic construct
  misc_feature 1..121: note = Description of artificial sequence: synthetic polynucleotide sequence
  source 1..121: mol_type = other DNA
gtgtcaacgagaactatcctgtgcattggtagcatgctaagcaggatccctggcctctaacatcagatggcaacaacattttccacccacgttgtgaaaaccaaaaagtctccagacattg

SEQ ID NO: 8333 - DNA, 121 bp, synthetic construct
  misc_feature 1..121: note = Description of artificial sequence: synthetic polynucleotide sequence
  source 1..121: mol_type = other DNA
cacccttctctcccatcctccttctccacccatccccccaaaatacacatatttttaaatgtacaggtctccagggaggagagaggaaccattttcactgaagctaagcacagctattaag

SEQ ID NO: 8334 - DNA, 121 bp, synthetic construct
  misc_feature 1..121: note = Description of artificial sequence: synthetic polynucleotide sequence
  source 1..121: mol_type = other DNA
tggaggcaaccacattttaaaaactgtctttttggactagtccaggtatcaactgtgattattcaggtcctcaaacaaacagtaaaaaacaaaaacaaacaaacaaacaaaacatgccttt

SEQ ID NO: 8335 - DNA, 121 bp, synthetic construct
  misc_feature 1..121: note = Description of artificial sequence: synthetic polynucleotide sequence
  source 1..121: mol_type = other DNA
tacaaatctaagtattgtgttaggcagtccactcttcagaagcaagatattacaaagtagttacaaagcaaaggagataattggctatagtaagctttatttcctttccttctcccctttt

SEQ ID NO: 8336 - DNA, 121 bp, synthetic construct
  misc_feature 1..121: note = Description of artificial sequence: synthetic polynucleotide sequence
  source 1..121: mol_type = other DNA
agccatgccggctcaatttcttacacaggaagcctcattaagggacacactagggtagctcctcattcttctgtctacatggaaacatctatcaaccagttctaaatagtgcttcacagaa

SEQ ID NO: 8337 - DNA, 121 bp, synthetic construct
  misc_feature 1..121: note = Description of artificial sequence: synthetic polynucleotide sequence
  source 1..121: mol_type = other DNA
tggacataaaatgcgtattcacattccaatggtgggaagtgattcacatggtcgcatctgactgcaagagaaattgagaaatactttctgagtactcagaaaagagagcatagaaattgtc

SEQ ID NO: 8338 - DNA, 121 bp, synthetic construct
  misc_feature 1..121: note = Description of artificial sequence: synthetic polynucleotide sequence
  source 1..121: mol_type = other DNA
gtttgggaatccctttcacttcctatctgtactctctcctggggtagtttcaagtcccactggctttaaatattgtcaataaatcaaatgactctcaagtttattattctttctcaatatc

SEQ ID NO: 8339 - DNA, 121 bp, synthetic construct
  misc_feature 1..121: note = Description of artificial sequence: synthetic polynucleotide sequence
  source 1..121: mol_type = other DNA
aagaaagagttcttccttgaccagccaatctaatgagccatctttttcttcgttattggctatcttttaacctttcctgtttccttcatatcagttatctgatgttgtgatgaaaagcttc

SEQ ID NO: 8340 - DNA, 121 bp, synthetic construct
  misc_feature 1..121: note = Description of artificial sequence: synthetic polynucleotide sequence
  source 1..121: mol_type = other DNA
tctctggcaagggcctcaagttcttctactgctctgggaatctcttaaaggtaaaccaagacttttgctgcctaggaatatttccagatcatggaatgtttagggcctttcatttttcatc

SEQ ID NO: 8341 - DNA, 121 bp, synthetic construct
  misc_feature 1..121: note = Description of artificial sequence: synthetic polynucleotide sequence
  source 1..121: mol_type = other DNA
gatggggaatacagagatgaaaaaaaatatcactagaaagaaaagagttcctattcaagaatcttctttctagtgatatttgctcacaaacttgagagggaaaaaaaagtatgaatcaaat

SEQ ID NO: 8342 - DNA, 121 bp, synthetic construct
  misc_feature 1..121: note = Description of artificial sequence: synthetic polynucleotide sequence
  source 1..121: mol_type = other DNA
ctgcaaagtttttcctttataatttattctagaagttttacagttctgccttccatagtcaggtccatggtctattttaagtgaatttttgtgtgtggtgttaggtagtggttgatcaacg

SEQ ID NO: 8343 - DNA, 121 bp, synthetic construct
  misc_feature 1..121: note = Description of artificial sequence: synthetic polynucleotide sequence
  source 1..121: mol_type = other DNA
caaggggcacacgtcccaaggcaacatgaagtttcctctttcgagtgagtccatttggatcaaagtcttcagtaaatggagaaacaggaggtactgccacagcaaactcaagctggtgctc

SEQ ID NO: 8344 - DNA, 121 bp, synthetic construct
  misc_feature 1..121: note = Description of artificial sequence: synthetic polynucleotide sequence
  source 1..121: mol_type = other DNA
ccgtctacacactatccgaatttacacatcggtttggcagtaaaaactgctgaacttggtctcaagatgtggaactgtggagaaattctaggacatgaacaagctatcctttcatcgagga

SEQ ID NO: 8345 - DNA, 121 bp, synthetic construct
  misc_feature 1..121: note = Description of artificial sequence: synthetic polynucleotide sequence
  source 1..121: mol_type = other DNA
tcaggagccttgtgggaaagaagccaaatggtctgtgttctcatttagggttcagacgtttataggcttgtcccgtgggctagaggtcctcaaagatgtctttgctagaggagagaaaaac

SEQ ID NO: 8346 - DNA, 121 bp, synthetic construct
  misc_feature 1..121: note = Description of artificial sequence: synthetic polynucleotide sequence
  source 1..121: mol_type = other DNA
cacactcatccttctgtagcccccatagcgcctagcatgtaaaaagcatcagaatgacctgaacaggggatgagaagctcttacgaaggtctggttggcctgtgtgaagggaacacaaaca

SEQ ID NO: 8347 - DNA, 121 bp, synthetic construct
  misc_feature 1..121: note = Description of artificial sequence: synthetic polynucleotide sequence
  source 1..121: mol_type = other DNA
gtgcccagccaaggcagcccaactttagaccatagccctgtgttccatctctaaccctccggctaatcctacccctcctgggcttccggctgatcagttgtaaagtacagctccctcgtgg

SEQ ID NO: 8348 - DNA, 121 bp, synthetic construct
  misc_feature 1..121: note = Description of artificial sequence: synthetic polynucleotide sequence
  source 1..121: mol_type = other DNA
gcaaatagagttaatgagtaaaaactgtacatacacataacctggagatgcttgggacaaaatttcaaggcaaaccctctggtcaaacctctggaaacatccagtaacagcatgctttcac

SEQ ID NO: 8349 - DNA, 121 bp, synthetic construct
  misc_feature 1..121: note = Description of artificial sequence: synthetic polynucleotide sequence
  source 1..121: mol_type = other DNA
taggacactgaggctaagattttgaggttactagcctaaaatcatataattaagaaacgttgggaacaggatttgagcccagatttggttgacctatgtcctataattctagccaacaaag

SEQ ID NO: 8350 - DNA, 6301 bp, synthetic construct
  misc_feature 1..6301: note = Description of artificial sequence: synthetic polynucleotide sequence
  source 1..6301: mol_type = other DNA
atgatgagtttctaagacgtgggggctaaagcttgtttggccgttttagggtttgttggaatttttttttcgtctatgtacttgtgaattatttcacgtttgccattaccggttctccatagggtgatgttcattagcagtggtgataggttaattttcaccatctcttatgcggttgaatagtcacctctgaaccactttttcctccagtaactcctctttcttcggaccttctgcagccaacctgaaagaataacaaggaggtggctggaaacttgttttaaggaaccgcctgtccttcccccgctggaaaccttgcacctcggacgctcctgctcctgcccccacctgacccccgccctcgttgacatccaggcgcgatgatctctgctgccagtagagggcacacttactttactttcgcaaacctgaacgcgggtgctgcccagagagggggcggagggaaagacgctttgcagcaaaatccagcatagcgattggttgctccccgcgtttgcggcaaaggcctggaggcaggagtaatttgcaatccttaaagctgaattgtgcagtgcatcggatttggaagctactatattcacttaacacttgaacgctgagctgcaaactcaacgggtaataacccatcttgaacagcgtacatgctatacacgcacccctttcccccgaattgttttctcttttggaggtggtggagggagagaaaagtttacttaaaatgcctttgggtgagggaccaaggatgagaagaatgttttttgtttttcatgccgtggaataacacaaaataaaaaatcccgagggaatatacattatatattaaatatagatcatttcagggagcaaacaaatcatgtgtggggctgggcaactagctaagtcgaagcgtaaataaaatgtgaatacacgtttgcgggttacatacagtgcactttcactagtattcagaaaaaattgtgagtcagtgaactaggaaattaatgcctggaaggcagccaaattttaattagctcaagactcccccccccccaaaaaaaggcacggaagtaatactcctctcctcttctttgatcagaatcgatgcattttttgtgcatgaccgcatttccaataataaaaggggaaagaggacctggaaaggaattaaacgtccggtttgtccggggaggaaagagttaacggtttttttcacaagggtctctgctgactcccccggctcggtccacaagctctccacttgccccttttaggaagtccggtcccgcggttcgggtaccccctgcccctcccatattctcccgtctagcacctttgatttctcccaaacccggcagcccgagactgttgcaaaccggcgccacagggcgcaaaggggatttgtctcttctgaaacctggctgagaaattgggaactccgtgtgggaggcgtgggggtgggacggtggggtacagactggcagagagcaggcaacctccctctcgccctagcccagctctggaacaggcagacacatctcagggctaaacagacgcctcccgcacggggccccacggaagcctgagcaggcggggcaggaggggcggtatctgctgctttggcagcaaattgggggactcagtctgggtggaaggtatccaatccagatagctgtgcatacataatgcataatacatgactccccccaacaaatgcaatgggagtttattcataacgcgctctccaagtatacgtggcaatgcgttgctgggttattttaatcattctaggcatcgttttcctccttatgcctctatcattcctccctatctacactaacatcccacgctctgaacgcgcgcccattaatacccttctttcctccactctccctgggactcttgatcaaagcgcggccctttccccagccttagcgaggcgccctgcagcctggtacgcgcgtggcgtggcggtgggcgcgcagtgcgttctcggtgtggagggcagctgttccgcctgcgatgatttatactcacaggacaaggatgcggtttgtcaaacagtactgctacggaggagcagcagagaaagggagagggtttgagagggagcaaaagaaaatggtaggcgcgcgtagttaattcatgcggctctcttactctgtttacatcctagagctagagtgctcggctgcccggctgagtctcctccccaccttccccaccctccccaccctccccataagcgcccctcccgggttcccaaagcagagggcgtgggggaaaagaaaaaagatcctctctcgctaatctccgcccaccggccctttataatgcgagggtctggacggctgaggacccccgagctgtgctgctcgcggccgccaccgccgggccccggccgtccctggctcccctcctgcctcgagaagggcagggcttctcagaggcttggcgggaaaaagaacggagggagggatcgcgctgagtataaaagccggttttcggggctttatctaactcgctgtagtaattccagcgagaggcagagggagcgagcgggcggccggctagggtggaagagccgggcgagcagagctgcgctgcgggcgtcctgggaagggagatccggagcgaatagggggcttcgcctctggcccagccctcccgctgatcccccagccagcggtccgcaacccttgccgcatccacgaaactttgcccatagcagcgggcgggcactttgcactggaacttacaacacccgagcaaggacgcgactctcccgacgcggggaggctattctgcccatttggggacacttccccgccgctgccaggacccgcttctctgaaaggctctccttgcagctgcttagacgctggatttttttcgggtagtggaaaaccaggtaagcaccgaagtccacttgccttttaatttatttttttatcactttaatgctgagatgagtcgaatgcctaaatagggtgtcttttctcccattcctgcgctattgacacttttctcagagtagttatggtaactggggctggggtggggggtaatccagaactggatcggggtaaagtgacttgtcaagatgggagaggagaaggcagagggaaaacgggaatggtttttaagactaccctttcgagatttctgccttatgaatatattcacgctgactcccggccggtcggacattcctgctttattgtgttaattgctctctgggttttggggggctgggggttgctttgcggtgggcagaaagccccttgcatcctgagctccttggagtagggaccgcatatcgcctgtgtgagccagatcgctccgcagccgctgacttgtccccgtctccgggagggcatttaaatttcggctcaccgcatttctgacagccggagacggacactgcggcgcgtcccgcccgcctgtccccgcggcgattccaacccgccctgatccttttaagaagttggcatttggctttttaaaaagcaataatacaatttaaaacctgggtctctagaggtgttaggacgtggtgttgggtaggcgcaggcaggggaaaagggaggcgaggatgtgtccgattctcctggaatcgttgacttggaaaaaccagggcgaatctccgcacccagccctgactcccctgccgcggccgccctcgggtgtcctcgcgcccgagatgcggaggaactgcgaggagcggggctctgggcggttccagaacagctgctacccttggtggggtggctccgggggaggtatcgcagcggggtctctggcgcagttgcatctccgtattgagtgcgaagggaggtgcccctattattatttgacaccccccttgtatttatggaggggtgttaaagcccgcggctgagctcgccactccagccggcgagagaaagaagaaaagctggcaaaaggagtgttggacgggggcggtactgggggtggggacgggggcggtggagagggaaggttgggaggggctgcggtgccggcgggggtaggagagcggctagggcgcgagtgggaacagccgcagcggaggggccccggcgcggagcggggttcacgcagccgctagcgcccaggcgcctctcgccttctccttcaggtggcgcaaaactttgtgccttggattttggcaaattgttttcctcaccgccacctcccgcggcttcttaagggcgccagggccgatttcgattcctctgccgctgcggggccgactcccgggctttgcgctccgggctcccgggggagcgggggctcggcgggcaccaagccgctggttcactaagtgcgtctccgagatagcaggggactgtccaaagggggtgaaagggtgctccctttattcccccaccaagaccacccagccgctttaggggatagctctgcaaggggagaggttcgggactgtggcgcgcactgcgcgctgcgccaggtttccgcaccaagacccctttaactcaagactgcctcccgctttgtgtgccccgctccagcagcctcccgcgacgatgcccctcaacgttagcttcaccaacaggaactatgacctcgactacgactcggtgcagccgtatttctactgcgacgaggaggagaacttctaccagcagcagcagcagagcgagctgcagcccccggcgcccagcgaggatatctggaagaaattcgagctgctgcccaccccgcccctgtcccctagccgccgctccgggctctgctcgccctcctacgttgcggtcacacccttctcccttcggggagacaacgacggcggtggcgggagcttctccacggccgaccagctggagatggtgaccgagctgctgggaggagacatggtgaaccagagtttcatctgcgacccggacgacgagaccttcatcaaaaacatcatcatccaggactgtatgtggagcggcttctcggccgccgccaagctcgtctcagagaagctggcctcctaccaggctgcgcgcaaagacagcggcagcccgaaccccgcccgcggccacagcgtctgctccacctccagcttgtacctgcaggatctgagcgccgccgcctcagagtgcatcgacccctcggtggtcttcccctaccctctcaacgacagcagctcgcccaagtcctgcgcctcgcaagactccagcgccttctctccgtcctcggattctctgctctcctcgacggagtcctccccgcagggcagccccgagcccctggtgctccatgaggagacaccgcccaccaccagcagcgactctggtaagcgaagcccgcccaggcctgtcaaaagtgggcggctggatacctttcccattttcattggcagcttatttaacgggccactcttattaggaaggagagatagcagatctggagagatttgggagctcatcacctctgaaaccttgggctttagcgtttcctcccatcccttccccttagactgcccatgtttgcagcccccctccccgtttgtctcccacccctcaggaatttcatttaggtttttaaaccttctggcttatcttacaactcaatccacttcttcttacctcccgttaacattttaattgccctggggcggggtggcagggagtgtatgaatgaggataagagaggattgatctctgagagtgaatgaattgcttccctcttaacttccgagaagtggtgggatttaatgaactatctacaaaaatgaggggctgtgtttagaggctaggcagggcctgcctgagtgcgggagccagtgaactgcctcaagagtgggtgggctgaggagctgggatcttctcagcctattttgaacactgaaaagcaaatccttgccaaagttggacttttttttttcttttattccttcccccgccctcttggacttttggcaaaactgcaatttttttttttttatttttcatttccagtaaaatagggagttgctaaagtcataccaagcaatttgcagctatcatttgcaacacctgaagtgttcttggtaaagtccctcaaaaataggaggtgcttgggaatgtgctttgctttgggtgtgtccaaagcctcattaagtcttaggtaagaattggcatcaatgtcctatcctgggaagttgcacttttcttgtccatgccataacccagctgtctttccctttatgagactcttaccttcatggtgagaggagtaagggtggctggctagattggttctttttttttttttttccttttttaagacggagtctcactctgtcactagg

SEQ ID NO: 8351 - DNA, 4021 bp, synthetic construct
  misc_feature 1..4021: note = Description of artificial sequence: synthetic polynucleotide sequence
  source 1..4021: mol_type = other DNA
gtctctcctgacctcacgatccgcccacctcggcctcccaaagtgctgggattacaggtgtgagccagggcaccaggcttagatgtggctctttggggagataattttgtccagagacctttctaacgtattcatgccttgtatttgtacagcattaatctggtaattgattattttaatgtaaccttgctaaaggagtgatttctatttcctttcttaaagaggaggaacaagaagatgaggaagaaatcgatgttgtttctgtggaaaagaggcaggctcctggcaaaaggtcagagtctggatcaccttctgctggaggccacagcaaacctcctcacagcccactggtcctcaagaggtgccacgtctccacacatcagcacaactacgcagcgcctccctccactcggaaggactatcctgctgccaagagggtcaagttggacagtgtcagagtcctgagacagatcagcaacaaccgaaaatgcaccagccccaggtcctcggacaccgaggagaatgtcaagaggcgaacacacaacgtcttggagcgccagaggaggaacgagctaaaacggagcttttttgccctgcgtgaccagatcccggagttggaaaacaatgaaaaggcccccaaggtagttatccttaaaaaagccacagcatacatcctgtccgtccaagcagaggagcaaaagctcatttctgaagaggacttgttgcggaaacgacgagaacagttgaaacacaaacttgaacagctacggaactcttgtgcgtaaggaaaagtaaggaaaacgattccttctaacagaaatgtcctgagcaatcacctatgaacttgtttcaaatgcatgatcaaatgcaacctcacaaccttggctgagtcttgagactgaaagatttagccataatgtaaactgcctcaaattggactttgggcataaaagaacttttttatgcttaccatcttttttttttctttaacagatttgtatttaagaattgtttttaaaaaattttaagatttacacaatgtttctctgtaaatattgccattaaatgtaaataactttaataaaacgtttatagcagttacacagaatttcaatcctagtatatagtacctagtattataggtactataaaccctaattttttttatttaagtacattttgctttttaaagttgatttttttctattgtttttagaaaaaataaaataactggcaaatatatcattgagccaaatcttaagttgtgaatgttttgtttcgtttcttccccctcccaaccaccaccatccctgtttgttttcatcaattgccccttcagagggtggtcttaagaaaggcaagagttttcctctgttgaaatgggtctgggggccttaaggtctttaagttcttggaggttctaagatgcttcctggagactatgataacagccagagttgacagttagaaggaatggcagaaggcaggtgagaaggtgagaggtaggcaaaggagatacaagaggtcaaaggtagcagttaagtacacaaagaggcataaggactggggagttgggaggaaggtgaggaagaaactcctgttactttagttaaccagtgccagtcccctgctcactccaaacccaggaattctgcccagttgatggggacacggtgggaaccagcttctgctgccttcacaaccaggcgccagtcctgtccatgggttatctcgcaaaccccagaggatctctgggaggaatgctactattaaccctatttcacaaacaaggaaatagaagagctcaaagaggttatgtaacttatctgtagccacgcagataatacaaagcagcaatctggacccattctgttcaaaacacttaacccttcgctatcatgccttggttcatctgggtctaatgtgctgagatcaagaaggtttaggacctaatggacagactcaagtcataacaatgctaagctctatttgtgtcccaagcactcctaagcattttatccctaactctacatcaaccccatgaaggagatactgttgatttccccatattagaagtagagagggaagctgaggcacacaaagactcatccacatgcccaagattcactgatagggaaaagtggaagcgagatttgaacccaggctgtttactcctaacctgtccaagccacctctcagacgacggtaggaatcagctggctgcttgtgagtacaggagttacagtccagtgggttatgttttttaagtctcaacatctaagcctggtcaggcatcagttcccctttttttgtgatttattttgtttttattttgttgttcattgtttaatttttccttttacaatgagaaggtcaccatcttgactcctaccttagccatttgttgaatcagactcatgacggctcctgggaagaagccagttcagatcataaaataaaacatatttattctttgtcatgggagtcattattttagaaactacaaactctccttgcttccatccttttttacatactcatgacacatgctcatcctgagtccttgaaaaggtatttttgaacatgtgtattaattataagcctctgaaaacctatggcccaaaccagaaatgatgttgattatataggtaaatgaaggatgctattgctgttctaattacctcattgtctcagtctcaaagtaggtcttcagctccctgtactttgggattttaatctaccaccacccataaatcaataaataattactttctttgactctgactcctagaataatctattcaaaaccttaatgtctttttcttgatccttcttttgagtcctaagtaccgccattacagcttcaaattggcacgtcatataggcgaatttcaaagggagatgcaatccacagaagtatagtagttcaaagggttacaaaagcaaggcgctcttaaacagctcagtctttgcccctttgtggcctagggctggagtgcagctctggggtgactcacttgggaatcgggaaggtgttagtctgaatcactaagtccaggcaagccctcagaataggagagagtgttcctagcaaggaaaacaactctccattccaaataatcaggaaagaactttagggatgtggagcttggctatgggaatagaaaggaaccattccaagtgcctattaggccgctcttacctttactgagccagagaatggctctgaaaacaggacagatgccaacttccttcccgaaagtcaggctgatcttgaccacaatacaaattggcccttagagcctatacagggagtcccaggggtctctgccattgtgcaacctattttgtagataataatcaagaatcggacgtgaaggggaggagtttgcaacttggtcaggaatgtataagaaggaataagctaattctgactatgccctttatccatgacactatccaggaattaatgactctcccagaggattcctggaatgattttgttgagggatggaatgtataaagaggaaggaagtgttattttatgctgccatttggaagcaacaaaggagatcaacagtatgaaaacaatcaatcaaatttgaaaatgaacaaagttttcacaatcccagcctaatacttagagagctcacagcttggatgcataagtaaagagttctctgctggtctttaagacaaactctcacacaaaacttgggaaaaaggacaaaaatgttgcattagggggttttctgtggtttgtttgcaataactataattggctcaatcaataattattttttagtatacacactaagggcccctgtagcattttttcccatcgataaataatccttagtctagaaaatgccgagggatgttctccacccttgtctataaatgcacttctagatgactttataaaaggctcctccttcaagtttatagaatattataagactacattaaaggagaagagaggccggtcgaggtagctcacacctgtaatcccagcactttg

SEQ ID NO: 8352 - DNA, 359 bp, synthetic construct
  misc_feature 1..359: note = Description of artificial sequence: synthetic polynucleotide sequence
  source 1..359: mol_type = other DNA
ctccgtctcaaaaataaataaataataaataaataaataaataaaggagaaaaagtaaaaacaaagccagtaggatgggagcaaggacttatttttaaaaataaaactaaaaagactctgctacctacctccaaagccttagcaaaaagtcttttttctagctccttcaggagagaacttacaccaactctccatttagaggaaaacacccagaaatgctggctttgccaaactggttggagacgactgtaaatgactgtaagttgatttcatttttaattttattttattcactattagcttatactaagctttttcggaagacagagttgagggaaacaagtgttcatgggacgtag

SEQ ID NO: 8353 - DNA, 360 bp, synthetic construct
  misc_feature 1..360: note = Description of artificial sequence: synthetic polynucleotide sequence
  source 1..360: mol_type = other DNA
atcttctgaggttgaaaggaatgctctttgttttcaaagaatgcctgggacctcagccacagtccccaacactttctttccattgtcatccccgtcagcgctttaagggataaaatagtccagtgcaatctgaggtctatgggggtgggaaaggagagagctcagagagagagaatgaacctttattacatacatacactcttccagactctccatctcaccagacccgacaacagccagctggaagaatgtgacagttgttgaatgtgacaatactgaggtttaggcaagttaaatggctgtccccaagtcacacaagggccaacaacaaaacaacagtaatatggctgagcgtggtgg

SEQ ID NO: 8354 - DNA, 121 bp, synthetic construct
  misc_feature 1..121: note = Description of artificial sequence: synthetic polynucleotide sequence
  source 1..121: mol_type = other DNA
cacacacacacaaattagctggccgtggtgacagcctgtagtcccagcttaggctgagcacaaacacactcacacaaattagctggccgtggtgacagcctgtagtcatagcttaggctga

SEQ ID NO: 8355 - DNA, 360 bp, synthetic construct
  misc_feature 1..360: note = Description of artificial sequence: synthetic polynucleotide sequence
  source 1..360: mol_type = other DNA
acctgtcatagtagttaacatttactgtgtgctaaacatttttacatgtgttacctgacttcatccccaaagcagcagttaggaggtgaactctatctccagtgcccatttcccaaatgagaagactgaaactttgatggattaagtaaattgcctgcattcacagagctggcaaaatggtgaaagcagaaattatttattcattcaccaacatttgagcatgctgtttgcccgcaccatgctagaggtaggaagagataccaagataaatgggatggataaggtcctggtgctgaggggttatggattaatggagaacaaagaaaacatgcatttttttttttctttgagatggagttt

SEQ ID NO: 8356 - DNA, 358 bp, synthetic construct
  misc_feature 1..358: note = Description of artificial sequence: synthetic polynucleotide sequence
  source 1..358: mol_type = other DNA
ttctgggattacaggcataagccaccgcgccccacggaaaacaggcaatttgattctattttacaaacactttcgagcttactatgtagcaggaggaggttcaagctccaggagctgctaaaggcattccttctccccccagagaaaatagaatccaggaaagagcccaggaaattctggaagaggagccaaaggagaagacatcatcagagagataaggagaagcttggaggaaagcatgtaaccaatgtcagggaggaagccctggtgtgtcaaaggcagcaagaagcacagcaagatagcagaggaaggtctgttggatttaatcacatgaacgcagcttcctggctgcacccct

SEQ ID NO: 8357 - DNA, 478 bp, synthetic construct
  misc_feature 1..478: note = Description of artificial sequence: synthetic polynucleotide sequence
  source 1..478: mol_type = other DNA
catgagtgggatgacagctccatccaccggcatcctctccttcattcccttcattcaatccatctccagaaacggctgcttttctgttctcccagcaccctgccctaccttctccaagagttcccaaagcatgattccagacaagcagcatccacatcatgtgtgtatttgctgcaaatgcgggtacacagcctgaattagaatctcaggagatggggcccagaaaactatttcaataagccctggatcgcttgatgaagtttgagaccctctgccttctccatcattcccagtgatcctcttccacaatcccagtgctacttatgaatcacagataaaataatgcccgtctctgcttaaaaccatccagaggggtcctgctatcttcagaattaagttcaaagccattcttcccagtggtccatgttctgtgagctttttcagatgccttgtcccctctgttcaaagcactgttcac

SEQ ID NO: 8358 - DNA, 121 bp, synthetic construct
  misc_feature 1..121: note = Description of artificial sequence: synthetic polynucleotide sequence
  source 1..121: mol_type = other DNA
ccaccacctacccatccactgacactgctacccaccagcctgccatgctcttcttcatcctttgtgactcaccttccagtatcctctgacctccagacaagtttccacaggggaatgggag

SEQ ID NO: 8359 - DNA, 240 bp, synthetic construct
  misc_feature 1..240: note = Description of artificial sequence: synthetic polynucleotide sequence
  source 1..240: mol_type = other DNA
tgcctgagataatactgctcacttctgtgaaaatcgctcttcctgcctcttaaatcaactccttgaggaatggacccactatcagtcttgtttaacaatgaatcttcagtggcaacgtaagtgcccagcatctaatagcaactcaataatcctttgatggggcttggcacagtggctcactcctgtaattccagtactttgagaggccgatgggggtggatcacaaggtcaggaatcaag

SEQ ID NO: 8360 - DNA, 241 bp, synthetic construct
  misc_feature 1..241: note = Description of artificial sequence: synthetic polynucleotide sequence
  source 1..241: mol_type = other DNA
ctttgatgaatggctgaataaagacccattttgatggagtgaaggatgttggagcatgagtagccgaggaagcaggagcaaagttctcaaccacctttcaagactcaactgggaagagaaggaaagagatgaatacaccaagtgaagtcaaacatttttatttggatttatttgattgactcaatctttctttccttttatatttatttatttatttatttatttatttatttattttgag

SEQ ID NO: 8361 - DNA, 239 bp, synthetic construct
  misc_feature 1..239: note = Description of artificial sequence: synthetic polynucleotide sequence
  source 1..239: mol_type = other DNA
aaagtgctgggattgcaggcgtgagccacagtgcccggcccaaattgtattttatgttatcaaagatagaagagataattagtttagatgctgatgggaccgagctgagagagggagaactgaagatacaggagcaaaggggatgatgtagccagatgtaggcatctccagggcagtttccatctttgttcagtgcctggagctctcagctgtgtgtggaactgaggtgaggaagaatg

SEQ ID NO: 8362 - DNA, 478 bp, synthetic construct
  misc_feature 1..478: note = Description of artificial sequence: synthetic polynucleotide sequence
  source 1..478: mol_type = other DNA
cattcctgaacacagcctcacctccaggtggtgattcttccaggtaggaacttcaaaggccaggccaggtctccttctctggactcccagagccctccccccttcctctatcacagcacaggttcatgtgctcatgtgtgtaaataacctgtttaattctctttctctattgctagattccttgtgggcaaagactatgtctttctctttcataactatatcctgaagaccaggcatgatgtccagtctctaaaattgttttgaataaatgaatgagcatataaacaaatgaatgaatgaataaatggatgtatgtgcatatagtttaagtttctacttcctgggactgtcagtctttttcaccccactcagtcctatgctgcctcctcagctcatgccaaatctcttcccttttgtctacctacttcattacagatagcaaaagactcagcaatagcttctctgaatctattagtca

SEQ ID NO: 8363 - DNA, 478 bp, synthetic construct
  misc_feature 1..478: note = Description of artificial sequence: synthetic polynucleotide sequence
  source 1..478: mol_type = other DNA
ggatatcctggtgacaaatgacagaaactcagctcaaatgggcaaaagcaaaaaaaaaaaaaaaaaaaaaaaagtgtatattagtttatgtaactgaaaaagcaggaatgattcaatctagaggcttacacaatagcccatctctgtagtttcatctcagtcaggatctatctccacctggggcaaaggtggctggcagcctttggaggcttacacaagcctctcaaagacagaacccctctttccctccaaggcgaaagccttagacaggattccagttgtctcccgcagtcatgtgcccactctgaggccagtggatcaactggatcccagcccccatcctgtggtagctttggggcccttcggttggtagcaccatcaggaaggggaaagacaagttctaaaaggaaaggatgggcacgcaaaaaggaacagatgttctctgcattgactctttgggcaattgtgttgctaagct

SEQ ID NO: 8364 - DNA, 360 bp, synthetic construct
  misc_feature 1..360: note = Description of artificial sequence: synthetic polynucleotide sequence
  source 1..360: mol_type = other DNA
cctgagagctacatagaatgtagcgcagatgtttttaaaaacctggttttcagaattaccttttgtgaaatagagatttcgaaagtccacctaagaactgctaaaccagaatgttcagagagtgacgcctaggatttcatatttttttaaagctccataagtaggccaggtgtggtggctagatcttgtaatcccagcactttgagaggccaaggtgggagaattgcttgagcccaggagttcaagaccaactcaggcaagatggtgagaccctgtctttaaaaaaattaaaaattagctgggtgatgcatgcctgaagtcccagctatatgagaggaccccttgggtccaggaatttga

SEQ ID NO: 8365 - DNA, 121 bp, synthetic construct
  misc_feature 1..121: note = Description of artificial sequence: synthetic polynucleotide sequence
  source 1..121: mol_type = other DNA
gtatagctacaaatactattcacaatgaagtacagatagaagattgattgaagaaaatggacagggctttagtaatctgtggggcaaaataaggcaacaagacataatatacatgttgtgt

SEQ ID NO: 8366 - DNA, 121 bp, synthetic construct
  misc_feature 1..121: note = Description of artificial sequence: synthetic polynucleotide sequence
  source 1..121: mol_type = other DNA
aaccctggtctgtctgatgctaaagccctgtttcttgcaactttgccatgttgcttcttgaagagaagggatgaaggtataaataatgttttgttagatggggaagattccaggctgggta

SEQ ID NO: 8367 - DNA, 121 bp, synthetic construct
  misc_feature 1..121: note = Description of artificial sequence: synthetic polynucleotide sequence
  source 1..121: mol_type = other DNA
tggaaatctcttgacagatgtagttaaggtcatttcaagagcaaatagacactagcttagttcagtcacttgctcagtagtctccctagacatttgccaagctgggtcactctcccagccc

SEQ ID NO: 8368 - DNA, 121 bp, synthetic construct
  misc_feature 1..121: note = Description of artificial sequence: synthetic polynucleotide sequence
  source 1..121: mol_type = other DNA
aatgaatttccatagtgtgccaggcattgtggtctgcaagttatgactgttatgttgttcattctctttttcagtaaggattgaatgcatttggtacatgtatatgccaactgagaatggc

SEQ ID NO: 8369 - DNA, 121 bp, synthetic construct
  misc_feature 1..121: note = Description of artificial sequence: synthetic polynucleotide sequence
  source 1..121: mol_type = other DNA
agaaacttcctgtccagccactagctgaccaccaagctaactggagagagacttacgtgaccacacatgaaaaacaatacagacattacagaattaatccaggaaattcactaaagccagt

SEQ ID NO: 8370 - DNA, 121 bp, synthetic construct
  misc_feature 1..121: note = Description of artificial sequence: synthetic polynucleotide sequence
  source 1..121: mol_type = other DNA
tacatcccacagtgcagcaccgatgggcagtggagacaagtgcaatgcaatgggcctcctgagcaggtcttcgagttgtaccaacgatgggaggctcagaacaagggccaggatctgacgc

SEQ ID NO: 8371 - DNA, 121 bp, synthetic construct
  misc_feature 1..121: note = Description of artificial sequence: synthetic polynucleotide sequence
  source 1..121: mol_type = other DNA
gccgcttttccccggacgactcggctggagcatccgcccttctgcggtcgggcccctacatgccacagtgtgatgcgtttggaagttgggagcctgtgcagtgccacgctgggactggtaa

SEQ ID NO: 8372 - DNA, 121 bp, synthetic construct
  misc_feature 1..121: note = Description of artificial sequence: synthetic polynucleotide sequence
  source 1..121: mol_type = other DNA
ccaagggcactttcagctccagctcccgccgggcaagatgtgcagtgctgactacgcggatttgctgcagactttccaggttttcatattggatgagctgacagcccgcggcttctgccag

SEQ ID NO: 8373 - DNA, 121 bp, synthetic construct
  misc_feature 1..121: note = Description of artificial sequence: synthetic polynucleotide sequence
  source 1..121: mol_type = other DNA
gaacaggcagggagcttggcctgtgtcccatgtcctgtgggcagaacgaccatttctgctggagctttcagccagactcactgtaagttctgtggagtgcttctttgaaagaaaagccctg

SEQ ID NO: 8374 - DNA, 121 bp, synthetic construct
  misc_feature 1..121: note = Description of artificial sequence: synthetic polynucleotide sequence
  source 1..121: mol_type = other DNA
gttcatcaagagtaagtctttgccatttgtccatattctttcaaaattactcttcacacgagcaaggccctctgctactttcttatgagccctccttgtggcctgaggagcttatacttct

SEQ ID NO: 8375 - DNA, 121 bp, synthetic construct
  misc_feature 1..121: note = Description of artificial sequence: synthetic polynucleotide sequence
  source 1..121: mol_type = other DNA
tttttttcctcctagattctgacatggggtctcggcctgagtctatgggatgtagaaaagacacagtgccaaggccagcatctccaacagaagcaggtactgacccccaaaccttcttaca

SEQ ID NO: 8376 - DNA, 121 bp, synthetic construct
  misc_feature 1..121: note = Description of artificial sequence: synthetic polynucleotide sequence
  source 1..121: mol_type = other DNA
gtgaaaaccttcaggcctgctctttctcttcctatgccaggttctttgaatgtgaacgacggtgcgatgcggacccatgctgcactggctttggatttctaaatgtttcccagttaaaagg

SEQ ID NO: 8377 - DNA, 214 bp, synthetic construct
  misc_feature 1..214: note = Description of artificial sequence: synthetic polynucleotide sequence
  source 1..214: mol_type = other DNA
caaagcagtgcaactgattattccaggacaactgattattgttgcatccaatgcagctcctggccgtgagtggccctttccactactggggtcctgtgatcgatggccacttcctccgtgagcctccagccagagcactgaagaggtctttatgggtagaggtcgatctgctcattgggagttctcaggacgacgggctcatcaacagagcaaa

SEQ ID NO: 8378 - DNA, 121 bp, synthetic construct
  misc_feature 1..121: note = Description of artificial sequence: synthetic polynucleotide sequence
  source 1..121: mol_type = other DNA
tcagaatccaactgaggaatttcgtatctttttttttttctagcaatttgaggaaagtcgaggccggaccagtagcaaaacagccttttaccaggcactgcagaattctctgggtggcgag

SEQ ID NO: 8379 - DNA, 121 bp, synthetic construct
  misc_feature 1..121: note = Description of artificial sequence: synthetic polynucleotide sequence
  source 1..121: mol_type = other DNA
atatttctagttggaggcatttcccaacatcttccagttagcacagtaccattcatagcgttgaagccttatctggttaaggccattcctgacacatgtatttgcctttaactggtttcaa

SEQ ID NO: 8380 - DNA, 121 bp, synthetic construct
  misc_feature 1..121: note = Description of artificial sequence: synthetic polynucleotide sequence
  source 1..121: mol_type = other DNA
aatctctcagattaaagtgaatgagctccctgccagcctcccacacctgtcctcagtattcttctagtcccagccactaagcaactctgaagagccctggaaacagcattaaaactactga

SEQ ID NO: 8381 - DNA, 121 bp, synthetic construct
  misc_feature 1..121: note = Description of artificial sequence: synthetic polynucleotide sequence
  source 1..121: mol_type = other DNA
aaaaaatatcctagaagtgtgaaggtacaggagtgtgtacagggagagaaaaaaattcaatgaccagggaatgagatatatagggttggggcaagcagtgggtggtctgaattgaacacat

SEQ ID NO: 8382 - DNA, 121 bp, synthetic construct
  misc_feature 1..121: note = Description of artificial sequence: synthetic polynucleotide sequence
  source 1..121: mol_type = other DNA
tgaatgacaatgttggtagaattccacaacttgcctggttgtgaatgtgcaggttaagatattgattaggaaagagtggcacattctctccagattcacaccacgcacacctccaggacag

SEQ ID NO: 8383 - DNA, 121 bp, synthetic construct
  misc_feature 1..121: note = Description of artificial sequence: synthetic polynucleotide sequence
  source 1..121: mol_type = other DNA
taaactttcctttactgaaagaagcatttcaatgcccatcttattcctcaaacattgcttgtcgattataaaaccagatcaaacagtttgggaatctaagctatgggatatagactaacac

SEQ ID NO: 8384 - DNA, 121 bp, synthetic construct
  misc_feature 1..121: note = Description of artificial sequence: synthetic polynucleotide sequence
  source 1..121: mol_type = other DNA
tctcaccttacagaatgaaaagggaagtgcctgctcatagttgggtggtggtgacttaataggatcatccaattgaagcaattagcacaactcatcatatttttatttaataaatgagtca

SEQ ID NO: 8385 - DNA, 121 bp, synthetic construct
  misc_feature 1..121: note = Description of artificial sequence: synthetic polynucleotide sequence
  source 1..121: mol_type = other DNA
atgaatttctcataaatttaacaagatgcatgatttaacaaatattatcaaacgtatggtgtatgggtgaattctgttgaaagaaatacaggattgaggcagaggcatccatgctcattac

SEQ ID NO: 8386 - DNA, 121 bp, synthetic construct
  misc_feature 1..121: note = Description of artificial sequence: synthetic polynucleotide sequence
  source 1..121: mol_type = other DNA
cagtgtatcagtgaggtttactctcatattgggcagattcttccagtgcctaatggcctttgatgtcttcaaattgcacagcttcatattggagtcattcctcatctccctcatttcctgg

SEQ ID NO: 8387 - DNA, 121 bp, synthetic construct
  misc_feature 1..121: note = Description of artificial sequence: synthetic polynucleotide sequence
  source 1..121: mol_type = other DNA
ggcatggctgcaaagaacattcatgagctggaaaatggtcagttagaaatatctcaaaaatggagagcaaaggagacagaaacataaaaacacaagagatacataaaacataatagaaaga

SEQ ID NO: 8388 - DNA, 121 bp, synthetic construct
  misc_feature 1..121: note = Description of artificial sequence: synthetic polynucleotide sequence
  source 1..121: mol_type = other DNA
aaaggccaagcatgtgtcaaccgccaaactgggtgttagggagacaggcatgaatgagacgggagttcaagacagggaagtatgacgagataatgatcatacactacaatgagtgctatat

SEQ ID NO: 8389 - DNA, 121 bp, synthetic construct
  misc_feature 1..121: note = Description of artificial sequence: synthetic polynucleotide sequence
  source 1..121: mol_type = other DNA
agtttgcctttcaccctttctgcctccaaactgcctctgttgctccccgaaagctctgcgggaaatagacgctcccatccatggaaactgtgaggagcaaaactgtcttcaatgacagtcg

SEQ ID NO: 8390 - DNA, 121 bp, synthetic construct
  misc_feature 1..121: note = Description of artificial sequence: synthetic polynucleotide sequence
  source 1..121: mol_type = other DNA
agggccatgagggttgtgcaaggcacatatgaaactccaagccaccgatgagagtggccataacactcagatgactgatggagaaatgactttgaaaagtattgggtggttggcaaaggga

SEQ ID NO: 8391 - DNA, 121 bp, synthetic construct
  misc_feature 1..121: note = Description of artificial sequence: synthetic polynucleotide sequence
  source 1..121: mol_type = other DNA
agcaggcaagatctgtggggtgccccaggccttgttcacagcatgttttcactgttaacactgaactcagtgcacactgatgacggagtcagcccacgctggagtctgatggcagcaaact

SEQ ID NO: 8392 - DNA, 121 bp, synthetic construct
  misc_feature 1..121: note = Description of artificial sequence: synthetic polynucleotide sequence
  source 1..121: mol_type = other DNA
caacgattccctaaagagtcttttctgcacacaaaaaccaccttcgaaagaaccaaaatcacatcaccttccaacaaagaggcataaaacccctcggaggacatatcaaaatactgagcgg

SEQ ID NO: 8393 - DNA, 121 bp, synthetic construct
  misc_feature 1..121: note = Description of artificial sequence: synthetic polynucleotide sequence
  source 1..121: mol_type = other DNA
gaacagtattccacccatgaacatttcagagttgattcacattttctcctgttgatgaacgttagctttccattgctaaagcatctttgcaccttggacataacaaatgtaacatacctgc

SEQ ID NO: 8394 - DNA, 121 bp, synthetic construct
  misc_feature 1..121: note = Description of artificial sequence: synthetic polynucleotide sequence
  source 1..121: mol_type = other DNA
ccagcagtcacattttctctgtgaaacagaatacggtggtgtctgctcagagaatgagggtacaaataaggttggactttgagtgccatgatggaagcttaggactatccccaaaggtaag

SEQ ID NO: 8395 - DNA, 121 bp, synthetic construct
  misc_feature 1..121: note = Description of artificial sequence: synthetic polynucleotide sequence
  source 1..121: mol_type = other DNA
tctctctgcctatgaccactgctctcatggagccccaggaattgttcctccgggcatagctcttgaggtgccccctccgatattgacctgggtccggctgtgggcatcagcaagaatggtg

SEQ ID NO: 8396 - DNA, 121 bp, synthetic construct
  misc_feature 1..121: note = Description of artificial sequence: synthetic polynucleotide sequence
  source 1..121: mol_type = other DNA
gggtcgcgggtttgtgggggcagaccttgggcgtcagatgcaggacagcgtccccagtgagtgcacccactgccaggctcaggaaggtctgcaggatgtagtgggtgacccccctgcagcc

SEQ ID NO: 8397 - DNA, 121 bp, synthetic construct
  misc_feature 1..121: note = Description of artificial sequence: synthetic polynucleotide sequence
  source 1..121: mol_type = other DNA
catcatatggatatataccacattatttttctgtttatcagctgatgaacatctgggttacttatgggttttggctattatgagtaatgttgctgtgaacttgtgtgcaagagtttttgaa

SEQ ID NO: 8398 - DNA, 121 bp, synthetic construct
  misc_feature 1..121: note = Description of artificial sequence: synthetic polynucleotide sequence
  source 1..121: mol_type = other DNA
cccttagggtaaaaggttactaagtgatggagttaggaaaagaacccaggtgttttattgctgtcccagtgatttttcataagcatttaaacagctatgaatccacctaatgtcttatgat

SEQ ID NO: 8399 - DNA, 121 bp, synthetic construct
  misc_feature 1..121: note = Description of artificial sequence: synthetic polynucleotide sequence
  source 1..121: mol_type = other DNA
acctggtggaaggtagagccatggaatggaagaagcccgagtccgtgaaactctgccaagatagaaactgcccgactgggaacacctacactggaccgttcagacacaagaaaataggtat

SEQ ID NO: 8400 - DNA, 121 bp, synthetic construct
  misc_feature 1..121: note = Description of artificial sequence: synthetic polynucleotide sequence
  source 1..121: mol_type = other DNA
aaagtgggttctattattatgtgcattttataaacaagaaaacagagaaatttacattacttggtcacgatcacagagctaacaaatagcggagcaaaatccagggagtggaatctcatct

SEQ ID NO: 8401 - DNA, 121 bp, synthetic construct
  misc_feature 1..121: note = Description of artificial sequence: synthetic polynucleotide sequence
  source 1..121: mol_type = other DNA
ggggcccgagctccgggtggtgaaggtgcgcatgggcatggtaagggggtggggggcctgggggcggcggcagaggagggagcggaggcgcggggggtaggtctacggtgctgcccgggaa

SEQ ID NO: 8402 - DNA, 121 bp, synthetic construct
  misc_feature 1..121: note = Description of artificial sequence: synthetic polynucleotide sequence
  source 1..121: mol_type = other DNA
agaaatgaggtggagatcaagttctcttgtacttagcctgtgacccaagctgccatcatcaatccttagcacagcctttccttacccatgcactggcttctcagtgaaatcttccagagag

SEQ ID NO: 8403 - DNA, 121 bp, synthetic construct
  misc_feature 1..121: note = Description of artificial sequence: synthetic polynucleotide sequence
  source 1..121: mol_type = other DNA
ggtgtcacccagaaagtgggtgaaattgcgaggacaggcagcacccctgaagtcagtacggtggatgccatgttagatctcatcaggtgagtgttttgccacaaggtggcttcaagggcat

SEQ ID NO: 8404 - DNA, 121 bp, synthetic construct
  misc_feature 1..121: note = Description of artificial sequence: synthetic polynucleotide sequence
  source 1..121: mol_type = other DNA
tggaatcttgctgaagctcaacagaaacttggtagcttagcactgcataattctgagtccttggatcaggagcatgccaaagcacaaacagcagtatcagaactgaggcaacgggaagaag

SEQ ID NO: 8405 - DNA, 227 bp, synthetic construct
  misc_feature 1..227: note = Description of artificial sequence: synthetic polynucleotide sequence
  source 1..227: mol_type = other DNA
catgggaatggcctgccttacgatgacagaaatggagggaacatccacctcttctatatatcagaatggtgatatttctggaaatgccaattctatgaagcaaatagatccagttcttcaggtgtatctttaccattcccttgggaaatctgaggcagattatctgacctttccatctggggagtatgttgcagaagaaatctgtattgctgcttctaaagcttgtg

SEQ ID NO: 8406 - DNA, 121 bp, synthetic construct
  misc_feature 1..121: note = Description of artificial sequence: synthetic polynucleotide sequence
  source 1..121: mol_type = other DNA
tatcacacctgtgtatcataatatgtttgctttaatgagtgaaacagaaaggatctggtatccacccaaccatgtcttccatatagatgagtcaaccaggcataatgtactctacagaata

SEQ ID NO: 8407 - DNA, 121 bp, synthetic construct
  misc_feature 1..121: note = Description of artificial sequence: synthetic polynucleotide sequence
  source 1..121: mol_type = other DNA
agattttactttcctcgttggtattgcagtggcagcaacagagcctatcggcatggaatatctcgaggtgctgaagctcctcttcttgatgactttgtcatgtcttacctctttgctcagg

SEQ ID NO: 8408 - DNA, 147 bp, synthetic construct
  misc_feature 1..147: note = Description of artificial sequence: synthetic polynucleotide sequence
  source 1..147: mol_type = other DNA
gtggcggcatgattttgtgcacggatggataaaagtacctgtgactcatgaaacacaggaagaatgtcttgggatggcagtgttagatatgatgagaatagccaaagaaaacgatcaaaccccactggccatctataactctatcag

SEQ ID NO: 8409 - DNA, 323 bp, synthetic construct
  misc_feature 1..323: note = Description of artificial sequence: synthetic polynucleotide sequence
  source 1..323: mol_type = other DNA
gctacaagacattcttaccaaaatgtattcgagcaaagatccaagactatcatattttgacaaggaagcgaataaggtacagatttcgcagatttattcagcaattcagccaatgcaaagccactgccagaaacttgaaacttaagtatcttataaatctggaaactctgcagtctgccttctacacagagaaatttgaagtaaaagaacctggaagtggtccttcaggtgaggagatttttgcaaccattataataactggaaacggtggaattcagtggtcaagagggaaacataaagaaagtgagacactgacagaacag

SEQ ID NO: 8410 - DNA, 121 bp, synthetic construct
  misc_feature 1..121: note = Description of artificial sequence: synthetic polynucleotide sequence
  source 1..121: mol_type = other DNA
ggatttacagttatattgcgattttcctaatattattgatgtcagtattaagcaagcaaaccaagagggttcaaatgaaagccgagttgtaactatccataagcaagatggtaaaaatctg

SEQ ID NO: 8411 - DNA, 159 bp, synthetic construct
  misc_feature 1..159: note = Description of artificial sequence: synthetic polynucleotide sequence
  source 1..159: mol_type = other DNA
ggaaattgaacttagctcattaagggaagctttgtctttcgtgtcattaattgatggatattatagattaactgcagatgcacatcattacctctgtaaagaagtagcacctccagccgtgcttgaaaatatacaaagcaactgtcatggcccaatttc

SEQ ID NO: 8412 - DNA, 121 bp, synthetic construct
  misc_feature 1..121: note = Description of artificial sequence: synthetic polynucleotide sequence
  source 1..121: mol_type = other DNA
tttaggatggattttgccattagtaaactgaagaaagcaggtaatcagactggactgtatgtacttcgatgcagtcctaaggactttaataaatattttttgacttttgctgtcgaggtta

SEQ ID NO: 8413 - DNA, 188 bp, synthetic construct
  misc_feature 1..188: note = Description of artificial sequence: synthetic polynucleotide sequence
  source 1..188: mol_type = other DNA
gcgagaaaatgtcattgaatataaacactgtttgattacaaaaaatgagaatgaagagtacaacctcagtgggacaaagaagaacttcagcagtcttaaagatcttttgaattgttaccagatggaaactgttcgctcagacaatataattttccagtttactaaatgctgtcccccaaagccaaaag

SEQ ID NO: 8414 - DNA, 121 bp, synthetic construct
  misc_feature 1..121: note = Description of artificial sequence: synthetic polynucleotide sequence
  source 1..121: mol_type = other DNA
aatcaaaccttctagtcttcagaacgaatggtgtttctgatgtaccaacctcaccaacattacagaggcctactcatatgaaccaaatggtgtttcacaaaatcagaaatgaagatttgat

SEQ ID NO: 8415 - DNA, 136 bp, synthetic construct
  misc_feature 1..136: note = Description of artificial sequence: synthetic polynucleotide sequence
  source 1..136: mol_type = other DNA
gaatgaaagccttggccaaggcacttttacaaagatttttaaaggcgtacgaagagaagtaggagactacggtcaactgcatgaaacagaagttcttttaaaagttctggataaagcacacagaaactattcagag

SEQ ID NO: 8416 - DNA, 121 bp, synthetic construct
  misc_feature 1..121: note = Description of artificial sequence: synthetic polynucleotide sequence
  source 1..121: mol_type = other DNA
cttttttttttccttagtctttctttgaagcagcaagtatgatgagcaagctttctcacaagcatttggttttaaattatggagtatgtgtctgtggagacgagagtaagtaaaactacag

SEQ ID NO: 8417 - DNA, 121 bp, synthetic construct
  misc_feature 1..121: note = Description of artificial sequence: synthetic polynucleotide sequence
  source 1..121: mol_type = other DNA
ttctggttcaggagtttgtaaaatttggatcactagatacatatctgaaaaagaataaaaattgtataaatatattatggaaacttgaagttgctaaacagttggcatgggccatgcattt

SEQ ID NO: 8418 - DNA, 140 bp, synthetic construct
  misc_feature 1..140: note = Description of artificial sequence: synthetic polynucleotide sequence
  source 1..140: mol_type = other DNA
ggaagaaaacacccttattcatgggaatgtatgtgccaaaaatattctgcttatcagagaagaagacaggaagacaggaaatcctcctttcatcaaacttagtgatcctggcattagtattacagttttgccaaaggaca

SEQ ID NO: 8419 - DNA, 153 bp, synthetic construct
  misc_feature 1..153: note = Description of artificial sequence: synthetic polynucleotide sequence
  source 1..153: mol_type = other DNA
gttcttcaggagagaataccatgggtaccacctgaatgcattgaaaatcctaaaaatttaaatttggcaacagacaaatggagttttggtaccactttgtgggaaatctgcagtggaggagataaacctctaagtgctctggattctcaaaga

SEQ ID NO: 8420 - DNA, 152 bp, synthetic construct
  misc_feature 1..152: note = Description of artificial sequence: synthetic polynucleotide sequence
  source 1..152: mol_type = other DNA
gaagctacaattttatgaagataggcatcagcttcctgcaccaaagtgggcagaattagcaaaccttataaataattgtatggattatgaaccagatttcaggccttctttcagagccatcatacgagatcttaacagtttgtttactccag

SEQ ID NO: 8421 - DNA, 138 bp, synthetic construct
  misc_feature 1..138: note = Description of artificial sequence: synthetic polynucleotide sequence
  source 1..138: mol_type = other DNA
gattatgaactattaacagaaaatgacatgttaccaaatatgaggataggtgccctggggttttctggtgcctttgaagaccgggatcctacacagtttgaagagagacatttgaaatttctacagcaacttggcaag

SEQ ID NO: 8422 - DNA, 191 bp, synthetic construct
  misc_feature 1..191: note = Description of artificial sequence: synthetic polynucleotide sequence
  source 1..191: mol_type = other DNA
gggtaattttgggagtgtggagatgtgccggtatgaccctctacaggacaacactggggaggtggtcgctgtaaaaaagcttcagcatagtactgaagagcacctaagagactttgaaagggaaattgaaatcctgaaatccctacagcatgacaacattgtaaagtacaagggagtgtgctacagtgctg

SEQ ID NO: 8423 - DNA, 121 bp, synthetic construct
  misc_feature 1..121: note = Description of artificial sequence: synthetic polynucleotide sequence
  source 1..121: mol_type = other DNA
cggcgtaatctaaaattaattatggaatatttaccatatggaagtttacgagactatcttcaaaaacataaagaacggatagatcacataaaacttctgcagtacacatctcagatatgca

SEQ ID NO: 8424 - DNA, 174 bp, synthetic construct
  misc_feature 1..174: note = Description of artificial sequence: synthetic polynucleotide sequence
  source 1..174: mol_type = other DNA
gggtatggagtatcttggtacaaaaaggtatatccacagggatctggcaacgagaaatatattggtggagaacgagaacagagttaaaattggagattttgggttaaccaaagtcttgccacaagacaaagaatactataaagtaaaagaacctggtgaaagtcccatattctg

SEQ ID NO: 8425 - DNA, 121 bp, synthetic construct
  misc_feature 1..121: note = Description of artificial sequence: synthetic polynucleotide sequence
  source 1..121: mol_type = other DNA
aggtatgctccagaatcactgacagagagcaagttttctgtggcctcagatgtttggagctttggagtggttctgtatgaacttttcacatacattgagaagagtaaaagtccaccagcgg

SEQ ID NO: 8426 - DNA, 121 bp, synthetic construct
  misc_feature 1..121: note = Description of artificial sequence: synthetic polynucleotide sequence
  source 1..121: mol_type = other DNA
ttaggaatttatgcgtatgattggcaatgacaaacaaggacagatgatcgtgttccatttgatagaacttttgaagaataatggaagattaccaagaccagatggatgcccagatgaggta

SEQ ID NO: 8427 - DNA, 121 bp, synthetic construct
  misc_feature 1..121: note = Description of artificial sequence: synthetic polynucleotide sequence
  source 1..121: mol_type = other DNA
tttacagatctatatgatcatgacagaatgctggaacaataatgtaaatcaacgcccctcctttagggatctagctcttcgagtggatcaaataagggataacatggctggatgaaagaaa

SEQ ID NO: 8428 - DNA, 121 bp, synthetic construct
  misc_feature 1..121: note = Description of artificial sequence: synthetic polynucleotide sequence
  source 1..121: mol_type = other DNA
cccatgcctgagaagacattcaccaccaccccaggagggtggctgctggaatctggacgtcccaaaggtgagagccctggactaccaaacaatcagaatgaggcctgaaaaaacaggctcc

SEQ ID NO: 8429 - DNA, 121 bp, synthetic construct
  misc_feature 1..121: note = Description of artificial sequence: synthetic polynucleotide sequence
  source 1..121: mol_type = other DNA
ataagtttcttaaattcttcaaagctaagattggaatcctttaatgcaggtacatactgctgtagctctggtaatgatggttgcctctcagatagggctgccttcagctccggtggcaaat

SEQ ID NO: 8430 - DNA, 475 bp, synthetic construct
  misc_feature 1..475: note = Description of artificial sequence: synthetic polynucleotide sequence
  source 1..475: mol_type = other DNA
gtagggagcgttgttcctccgcgggtgcccacggcccagtatctctggctagctcgctgggcactttaggacggagggtctctacaccctttctttgggatggagagaggagaagggaaagggaacgcgatggtctagggggcagtagagccaattacctgttggggttaataagaacaggcaatgcatctggccttcctccaggcgcgattcagttttgctctaaaaataatttatacctctaaaaataaataagataggtagtataggataggtagtcattcttatgcgactgtgtgttcagaatatagctctgatgctaggctggaggtctggacacgggtccaagtccaccgccagctgcttgctagtaacatgacttgtgtaagttatcccagctgcagcatctaagtaagtctcttcctgcgctaagcaggtccaggatccctgaacggaatttatttgctctgtccat

SEQ ID NO: 8431 - DNA, 475 bp, synthetic construct
  misc_feature 1..475: note = Description of artificial sequence: synthetic polynucleotide sequence
  source 1..475: mol_type = other DNA
tctgagaacccaaaggagtcctaaaagaggaatggaggagcctaagaataaaaatagtataataaaacatttcttagacacattgaccttggcctatgtcaaagttcagtctgggtttgtcttataacacaaggagtaaaagtaccattgttctacctctttttttaatacttgaaaaaaatttactgtggatgcttttctatgaattaaataaccttctaaaaaatgttttcattgctgcattcgattagattgggtaactaaatgaaattaattcctcactgttgggtataaaggttatttacagtggttctgtcttagccattcactgaactcattgcatatatatctctggaatattgctgattgtttccttcaagtaaacttagaagtgtaactacttagtcaaagagcctgaatattttaaaggccttttgaagaaaactgaaaatgctttccagaaaggatgtatcag

SEQ ID NO: 8432 - DNA, 476 bp, synthetic construct
  misc_feature 1..476: note = Description of artificial sequence: synthetic polynucleotide sequence
  source 1..476: mol_type = other DNA
ttgacaatgacagtcgtcaacagtatttaaggagaactatgatactctgaagaaaaacttagcctttctcagtaaaagtaggtaggcagaggccacatgacagcagttagagtgtggtcttcaaggaagtcacagaaatactgtggggaattgaaaccccatgtggaaaatgtacaagagtgtctcagtgtgactgagaaggaggttgggcatggggtttcatggagtttaataaagtttggtcacttagtagaggtttaataaatcaactgtcttaatctttgatcctacttaagaattttttttttgtttttgtagagatggggctcttgttatgttgcccaggctgttctcgaactcctagcctcaggcgatcctccctcctcaggctccagaagtcctgggattactggcgggagccaccatgcaggcctcttgctcctacttttgagaaaggaagtttaaccggttttttt

SEQ ID NO: 8433 - DNA, 237 bp, synthetic construct
  misc_feature 1..237: note = Description of artificial sequence: synthetic polynucleotide sequence
  source 1..237: mol_type = other DNA
cgcctgcctcggcctcccaaagtgctgggattacaggcatgagccactgctcctggctgcttaactttttctctatctcatcctcctacccatcctacccttggaagatagagaagtagtattagttccatagtgttatactgggcttcccccagggacaaacccacttccccaacctgaatgagccatcacttcttccccagtttacatttcattgctctttaaatgtctccattc

SEQ ID NO: 8434 - DNA, 474 bp, synthetic construct
  misc_feature 1..474: note = Description of artificial sequence: synthetic polynucleotide sequence
  source 1..474: mol_type = other DNA
ggatatgggaattcacatatggtcataattcttacctgaagaagatgtcagtcttcttctcttagaccaactgccctgatatgaggtttagaggttaaagaacatgtgtgtatttacatgatctttgtattctgccttttcgtccctcactaatgacagctgcaccccaaggaaatggagctgtggaagagagggtttgataagaaattaagtaaatattggatctaatccatcaccctccaggaagcctttattactcctaaaaatttcaaccaaattcattaaaggacaagaactccaccagagtaggccataaacattggcaaaattagttgtaatccatgactagatttaatgtccctttgttttattcccatatggttataatgctttgcttggcattaggggtattttaagttttcttctgcctagtaagtgaatttgtgtttataatacaataatcataaaatatca

SEQ ID NO: 8435 - DNA, 476 bp, synthetic construct
  misc_feature 1..476: note = Description of artificial sequence: synthetic polynucleotide sequence
  source 1..476: mol_type = other DNA
cattaatattttataactgtacagttataaaatattttataagtaatatttatattttataagtaatattttataactgtacagttaactctggcccaaggaaaagatagtctgatagatgctgcagccccattttagcaaatgtgacctcacaggcctgaatgccatcgctattccacatctacaggatagacggaaaggaaagaaataaaaaaataggtacctaacactggcaagaggatgatgactcatgttatttcacttaacctttttatcttttaacatgaaggactcatacaggttgataagaaaccagtgacataaacagaccaaaaaatgatcagatctttcaaattagcaaaaaaataatattttttaaacaatgggtgaaaatacagtgtaacagtaccaattatcaacatgtgttgagaaccagaaaaatgttctttttctttgatcagcaacactatttggga

SEQ ID NO: 8436 - DNA, 474 bp, synthetic construct
  misc_feature 1..474: note = Description of artificial sequence: synthetic polynucleotide sequence
  source 1..474: mol_type = other DNA
aaatctatcctcagggcctagcctggggccctggcacacagtaggcactcaacgaatatttgctgaacacacaaatacttatgatattttaaaaaattggcaacaatctgatacctaacaatagagggattaaatattatggaactgttaaataagatgcttatgaataccatgcagtaagatgggcaatatttatgccataagctttaatgaaacaaatgggtattaaatgtatgataaggttataaattactttttaaaagattacagggaaaaaaattgaaagatatacactgaaatgttttttgctcacagtggtgacaaggtttctcagcactggcactgttgacgttttaggctgtatgtctttgctgtgggaggctggcctgtgcactgcagggtgtttggcagcactcttggcctctgcccctagatagcaatagcagtcctccctcaaccagcccaattttgaca

SEQ ID NO: 8437 - DNA, 476 bp, synthetic construct
  misc_feature 1..476: note = Description of artificial sequence: synthetic polynucleotide sequence
  source 1..476: mol_type = other DNA
accaaaaatgtttccaggcatcaccagatgctccctgggtgagagtgatgaaatagtaggggattttccccttcttttcttattttctgtaattccattatattactttaataataaagaaaaaaacataaaaaataaacgaatgttattattctacgtcagtttggatgtttggactccattttggggttctttccattatatcacttggtctgctaaacattctacggtttggtaaggtgaagtgattcatgaaattttggttttatttttttcctgatactaaaaataaaacattctttcacttggaaatttggacacagaacaccaaaaaaaatccataatctcatctctctttttctgtcttttccttccttttttccctttaaaaacaataaagagtgaaacctacctgttctccctctaatttaattcctaaatataatcactgtcaatatcttggacatttcctgtgt

SEQ ID NO: 8438 - DNA, 474 bp, synthetic construct
  misc_feature 1..474: note = Description of artificial sequence: synthetic polynucleotide sequence
  source 1..474: mol_type = other DNA
ctaaacacacacacacacttttttttttcagcaaaagtggatttctgctacatgtagtgttctgcaacttactttctatgtgtttacaaaatcagtacatgtacatatgctgaattcagtccttaatggtattatattttgtgaatataccaaaatttgtttaaccacttagacaatctaggatattctcagtttgctgttatgagcaatgctcttcctttacatatacagacatatatatatatatgtgtgtgtgtgtgtttttgttttagtaggatagatttctaggagagggtgaaaggtcttatgacatccgcatttacgattgtaataggaagtatcaaagtgccccctaaagaaaaaaatcctcccattagtgggtaagaaagcctatttgttcatatcttcacaaacactaaatattagaaatatttacaattgtggtcaagctcataagtgaaaatggtatttcat

SEQ ID NO: 8439 - DNA, 475 bp, synthetic construct
  misc_feature 1..475: note = Description of artificial sequence: synthetic polynucleotide sequence
  source 1..475: mol_type = other DNA
atcttatattttttattgtgagattgaacatctttcatatgtttacatgtcacctgtatttcttattctctgaactatatgttatgacctttcactttttttcctcatgggttatgtgtagtttgtatagttgtcttattgattgttaggagctatttatatattaggaacattaatctcctgtcttatatatacgtggcatcgattagttgatcatttgtgagttcatgtctgtatacaaagattggagaggcactaagagggaaaacttacctctttcttatcaaagtttgtaaatatatgtataacagaagagggagaaaatattaataaatgcacagattggctgaaatagagtataaatcttttactcccctacttcaacataaactgcaaaaggagagtgacttttctttcactctgacttccgtattcctcatgcttaaaatagtgcctagcacagaagaggtgctca

SEQ ID NO: 8440 - DNA, 475 bp, synthetic construct
  misc_feature 1..475: note = Description of artificial sequence: synthetic polynucleotide sequence
  source 1..475: mol_type = other DNA
atcagtgtttgctaaacgaaataattagtcacatttcaagcaggatgactaaatgaagaatagaatctaggcagatactctggaagagtggctgtgagtcattcatatcttagtatgaattagtcaaatccaactctctccccttcccactccccactgttagtagaagaatctgtttattgagagaatagatttataatttagaataagtgagaggggcagaagaggagattttgaaggatggcacctgaaggaggactagcatggctgagacagtgaagtggaagccttgaatagctaaagggtaagatgaaagtatttagctgtagggggaaaaagcattgacaggttggaaaagtaaaagtcagattctccttgctctgaaattttgtacagggcaggttctactaggtatgttacaatgcagaaaaaacatgaaataattgagaggaatttggtgcaatattatcttctt

SEQ ID NO: 8441 - DNA, 358 bp, synthetic construct
  misc_feature 1..358: note = Description of artificial sequence: synthetic polynucleotide sequence
  source 1..358: mol_type = other DNA
ggcttcttttgagtgggcagatttttttcacggcctgtaactataataaatttgaaacttctcatcttttagtaacttttttcacttaagtttatgtggctgtgggcaatggaatgaagatattgaacttccaattccctgttgggtttccacaattacaagtcaatcatgactggttattagaagactatttcagttagaaccaccaagtcccatattgtcatattgtatgtttaattattaagtgaagcagtcttcttttcgtgttttccataattagggcattccagaaagatgaggatatttgctgtctttatattcatgacctactggcatttgctgaacggtaagacaccaa

SEQ ID NO: 8442 - DNA, 343 bp, synthetic construct
  misc_feature 1..343: note = Description of artificial sequence: synthetic polynucleotide sequence
  source 1..343: mol_type = other DNA
gcatttactgtcacggttcccaaggacctatatgtggtagagtatggtagcaatatgacaattgaatgcaaattcccagtagaaaaacaattagacctggctgcactaattgtctattgggaaatggaggataagaacattattcaatttgtgcatggagaggaagacctgaaggttcagcatagtagctacagacagagggcccggctgttgaaggaccagctctccctgggaaatgctgcacttcagatcacagatgtgaaattgcaggatgcaggggtgtaccgctgcatgatcagctatggtggtgccgactacaagcgaattactgtgaaagtcaatg

SEQ ID NO: 8443 - DNA, 345 bp, synthetic construct
  misc_feature 1..345: note = Description of artificial sequence: synthetic polynucleotide sequence
  source 1..345: mol_type = other DNA
gccccatacaacaaaatcaaccaaagaattttggttgtggatccagtcacctctgaacatgaactgacatgtcaggctgagggctaccccaaggccgaagtcatctggacaagcagtgaccatcaagtcctgagtggtaagaccaccaccaccaattccaagagagaggagaagcttttcaatgtgaccagcacactgagaatcaacacaacaactaatgagattttctactgcacttttaggagattagatcctgaggaaaaccatacagctgaattggtcatcccaggtaatattctgaatgtgtccattaaaatatgtctaacactgtcccctagcacctag

SEQ ID NO: 8444 - DNA, 121 bp, synthetic construct
  misc_feature 1..121: note = Description of artificial sequence: synthetic polynucleotide sequence
  source 1..121: mol_type = other DNA
ttttcagaactacctctggcacatcctccaaatgaaaggactcacttggtaattctgggagccatcttattatgccttggtgtagcactgacattcatcttccgtttaagaaaaggtagta

SEQ ID NO: 8445 - DNA, 121 bp, synthetic construct
  misc_feature 1..121: note = Description of artificial sequence: synthetic polynucleotide sequence
  source 1..121: mol_type = other DNA
atggaaataaaaatgatttctttttctcaagggagaatgatggatgtgaaaaaatgtggcatccaagatacaaactcaaagaagcaaagtggtaagaatatcagaaggaattgggaagtaa

SEQ ID NO: 8446 - DNA, 240 bp, synthetic construct
  misc_feature 1..240: note = Description of artificial sequence: synthetic polynucleotide sequence
  source 1..240: mol_type = other DNA
gatacacatttggaggagacgtaatccagcattggaacttctgatcttcaagcagggattctcaacctgtggtttaggggttcatcggggctgagcgtgacaagaggaaggaatgggcccgtgggatgcaggcaatgtgggacttaaaaggcccaagcactgaaaatggaacctggcgaaagcagaggaggagaatgaagaaagatggagtcaaacagggagcctggagggagaccttga

SEQ ID NO: 8447 - DNA, 241 bp, synthetic construct
  misc_feature 1..241: note = Description of artificial sequence: synthetic polynucleotide sequence
  source 1..241: mol_type = other DNA
tactttcaaatgcctgaggggctcatcgacgcctgtgacagggagaaaggatacttctgaacaaggagcctccaagcaaatcatccattgctcatcctaggaagacgggttgagaatccctaatttgagggtcagttcctgcagaagtgccctttgcctccactcaatgcctcaatttgttttctgcatgactgagagtctcagtgttggaacgggacagtatttatgtatgagtttttcc

SEQ ID NO: 8448 - DNA, 241 bp, synthetic construct
  misc_feature 1..241: note = Description of artificial sequence: synthetic polynucleotide sequence
  source 1..241: mol_type = other DNA
tatttattttgagtctgtgaggtcttcttgtcatgtgagtgtggttgtgaatgatttcttttgaagatatattgtagtagatgttacaattttgtcgccaaactaaacttgctgcttaatgatttgctcacatctagtaaaacatggagtatttgtaaggtgcttggtctcctctataactacaagtatacattggaagcataaagatcaaaccgttggttgcataggatgtcacctttat

SEQ ID NO: 8449 - DNA, 241 bp, synthetic construct
  misc_feature 1..241: note = Description of artificial sequence: synthetic polynucleotide sequence
  source 1..241: mol_type = other DNA
ttaacccattaatactctggttgacctaatcttattctcagacctcaagtgtctgtgcagtatctgttccatttaaatatcagctttacaattatgtggtagcctacacacataatctcatttcatcgctgtaaccaccctgttgtgataaccactattattttacccatcgtacagctgaggaagcaaacagattaagtaacttgcccaaaccagtaaatagcagacctcagactgccac

SEQ ID NO: 8450 - DNA, 479 bp, synthetic construct
  misc_feature 1..479: note = Description of artificial sequence: synthetic polynucleotide sequence
  source 1..479: mol_type = other DNA
ccactgtccttttataatacaatttacagctatattttactttaagcaattcttttattcaaaaaccatttattaagtgcccttgcaatatcaatcgctgtgccaggcattgaatctacagatgtgagcaagacaaagtacctgtcctcaaggagctcatagtataatgaggagattaacaagaaaatgtattattacaatttagtccagtgtcatagcataaggatgatgcgaggggaaaacccgagcagtgttgccaagaggaggaaataggccaatgtggtctgggacggttggatatacttaaacatcttaataatcagagtaattttcatttacaaagagaggtcggtacttaaaataaccctgaaaaataacactggaattccttttctagcattatatttattcctgatttgcctttgccatataatctaatgcttgtttatatagtgtctggtattgtttaacagttctgt

SEQ ID NO: 8451 - DNA, 481 bp, synthetic construct
  misc_feature 1..481: note = Description of artificial sequence: synthetic polynucleotide sequence
  source 1..481: mol_type = other DNA
cttttctatttaaatgccactaaattttaaattcatacctttccatgattcaaaattcaaaagatcccatgggagatggttggaaaatctccacttcatcctccaagccattcaagtttcctttccagaagcaactgctactgcctttcattcatatgttcttctaaagatagtctacatttggaaatgtatgttaaaagcacgtatttttaaaatttttttcctaaatagtaacacattgtatgtctgctgtgtactttgctatttttatttattttagtgtttcttatatagcagatggaatgaatttgaagttcccagggctgaggatccatgccttctttgtttctaagttatctttcccatagcttttcattatctttcatatgatccagtatatgttaaatatgtcctacatatacatttagacaaccaccatttgttaagtatttgctctaggacagagtttggatttgtttat

SEQ ID NO: 8452 - DNA, 240 bp, synthetic construct
  misc_feature 1..240: note = Description of artificial sequence: synthetic polynucleotide sequence
  source 1..240: mol_type = other DNA
gtttgctcaaaaggagacccatgggctctccagggtgcactgagtcaatctagtcctaaaaagcaatcttattattaactctgtatgacagaatcatgtctggaacttttgttttctgctttctgtcaagtataaacttcactttgatgctgtacttgcaaaatcacattttctttctggaaattccggcagtgtaccttgactgctagctaccctgtgccagaaaagcctcattcgttg

SEQ ID NO: 8453 - DNA, 241 bp, synthetic construct
  misc_feature 1..241: note = Description of artificial sequence: synthetic polynucleotide sequence
  source 1..241: mol_type = other DNA
tgcttgaacccttgaatgccaccagctgtcatcactacacagccctcctaagaggcttcctggaggtttcgagattcagatgccctgggagatcccagagtttcctttccctcttggccatattctggtgtcaatgacaaggagtaccttggctttgccacatgtcaaggctgaagaaacagtgtctccaacagagctccttgtgttatctgtttgtacatgtgcatttgtacagtaattg

SEQ ID NO: 8454 - DNA, 481 bp, synthetic construct
  misc_feature 1..481: note = Description of artificial sequence: synthetic polynucleotide sequence
  source 1..481: mol_type = other DNA
gtgtgacagtgttctttgtgtgaattacaggcaagaattgtggctgagcaaggcacatagtctactcagtctattcctaagtcctaactcctccttgtggtgttggatttgtaaggcactttatcccttttgtctcatgtttcatcgtaaatggcataggcagagatgatacctaattctgcatttgattgtcactttttgtacctgcattaatttaataaaatattcttatttattttgttacttggtacaccagcatgtccattttcttgtttattttgtgtttaataaaatgttcagtttaacatcccagtggagaaagttacttggaatatttgcagccttgttcctagttcttttttcattgcttatacagcatgtttttatacagcatgcttttgaatcctgcacaatgaaaaaagtatcaaaagattttattttaaaaaagaatgtattgaaaattttcattctctctcattcg

SEQ ID NO: 8455 - DNA, 241 bp, synthetic construct
  misc_feature 1..241: note = Description of artificial sequence: synthetic polynucleotide sequence
  source 1..241: mol_type = other DNA
gcagcttcctttaggaccataccaagaagagtcaaaatcctgtcatctacattgaagatctaagggagagagggtgggagagaaggagtggaacccaatagaactatagggaaacaaagggacttacctctaagaaagtacttttcccagatctgtaaacgggtatgcaatccagtgtgtaggaagatagatgtattgcagtcttcaagttttgaaaataaagcgaggaaactagaactaa

SEQ ID NO: 8456 - DNA, 241 bp, synthetic construct
  misc_feature 1..241: note = Description of artificial sequence: synthetic polynucleotide sequence
  source 1..241: mol_type = other DNA
gccaagttgaggattaagggctagcaatggttaggaccatagatctgtggttttaaacaagcatgacaaaacttatcattcaaggaagtatagaccttttaatgtgtcatccggtgagattttagtcatgaaattccattttaaaagactatcacttatttgaatcagatactcttaaaggattataatggctatttctaagaatatgtgtttgactctagatgcttttgtttgtttgttt

SEQ ID NO: 8457 - DNA, 360 bp, synthetic construct
  misc_feature 1..360: note = Description of artificial sequence: synthetic polynucleotide sequence
  source 1..360: mol_type = other DNA
ctcccaaagggctgggattacaggtgtgagccacggtgcctggcctctggatgttttcagtagtaatgatgatgcactatttatgctagcccttgggcagtcaaagcaataaaaatgtgtgctagacatcaagatatctggccttcctaatcaggaaaggatatggagaactagtcttcctggcttgccttggtggtatggaaattttgtgacacttgaggggtctgtattatagaaaagttaatatgaaaatggttcataagctttcattaaacttttgttctagtcccttttacaagtgtgtgcctgtctgccacaagtaggcctaatatattttttaagttttatttttaattgaca

SEQ ID NO: 8458 - DNA, 241 bp, synthetic construct
  misc_feature 1..241: note = Description of artificial sequence: synthetic polynucleotide sequence
  source 1..241: mol_type = other DNA
gagctatagactggagctgttcctatttggccatcttggaatctccctacccattttccataattgacatatttatagggtacagtgtaatgttttgatagaagtatacattgtgtaattatcaaatcagggtaattagcatattcttttcctcaaatatttatcatttatttgtgataagaacattcaaaatattctctcctagttattttgagttatacagtataatactgttaaccac

SEQ ID NO: 8459 - DNA, 121 bp, synthetic construct
  misc_feature 1..121: note = Description of artificial sequence: synthetic polynucleotide sequence
  source 1..121: mol_type = other DNA
aggaaactcacaatcatggtggaaggggaagcagtcaccttcctcacaaggcagtaagaggagagagagcaaagagggaagagccctttatgaaactatcagctcttatgagaattaactc

SEQ ID NO: 8460 - DNA, 361 bp, synthetic construct
  misc_feature 1..361: note = Description of artificial sequence: synthetic polynucleotide sequence
  source 1..361: mol_type = other DNA
ttgtgtgaggacagagccaaactgtatcaccctactatgcaatagaacaccagaacttattccttctatctaactataagtttgtacctgttgaccgatctctactaatctcccctcctcatgcccccaaccctctccagcctctggtaaccactaccctactttctacttctgtgatatcaaccttttaacattccacatatgagtgagatcatttagtatttgtgtttctttgcctggctatttcacttaacataattatcctctagttttatccatgttgccacaaatgacaggatttcatttgttatggctgaatactattctattttgtgtgtgtgtgtgtgtgtgtgtgtgtgtg

SEQ ID NO: 8461 - DNA, 240 bp, synthetic construct
  misc_feature 1..240: note = Description of artificial sequence: synthetic polynucleotide sequence
  source 1..240: mol_type = other DNA
agctgggaatataggcacatgccactgcacctggcttatataccaccttttcctcatccattcatctgttgatggacacttaagttgattccatagcttcactattgtgaatagtgctgcaataaacctagcagtgtagatgtctatttatgtctttatttatttaactattttatttatttattctttatttaactattttaaagctgagaaattcaaaattaacttttgttctattga

SEQ ID NO: 8462 - DNA, 478 bp, synthetic construct
  misc_feature 1..478: note = Description of artificial sequence: synthetic polynucleotide sequence
  source 1..478: mol_type = other DNA
tatatttggccaaatttgttaagacagatacacctgtttttagaatttttcctatcccaggcttccaaagtttcaagaaaattgatataataaaccaacttattcccattataatttaaacatttccgaaattatttccattttaaaagaagttaatgtttgaccaatgaagcaattgtcaatgatggggttttattatgagtttaataatgatatttaccatttattgagcatgtaccttatgcaaggtcttcatctgtcaatcatctcttctttctgcaaatacaagacttagcaagcttggagtaagttatgaatgctaacatatgtgagatcaaatagtctctttctagggcactgaaggtctttggggacttaaaaactcgattacaatgattcagtcatataagagaaaattgcaacacacacacacacataaaacagaaaagaactatttgtacatgccaggaaacactgc

SEQ ID NO: 8463 - DNA, 480 bp, synthetic construct
  misc_feature 1..480: note = Description of artificial sequence: synthetic polynucleotide sequence
  source 1..480: mol_type = other DNA
tctaagagttgctttattctaggtgactatgaaaggaaaaaaaaaatctaactatagagaagttaaaaaatgtacatatatttgggaagaataggaaatttcaccaaaggcctggagtcactcaaacccgagttccaatcttcttagatgtaaattaacttcattgaaccagtttactttaaaaattcttgtttttattaaaaatttcaattactattaaaattatatttttaattaaaaatactttaaaaattaaagtgtatagtttttctatttatcttaaatattcaaataattgtgaattaaagttgtgccagcttgaagatttaaagtgataggcttaataattttggaacttttcttaatgtcaaagttaactagagcttcttttctttttcaaattacacatttaaaattccggcatcagttcctttttgagtcatctaggtctctcacgtcagtaaatattgagctactgta

SEQ ID NO: 8464 - DNA, 240 bp, synthetic construct
  misc_feature 1..240: note = Description of artificial sequence: synthetic polynucleotide sequence
  source 1..240: mol_type = other DNA
aagctgaagttacttacgtagtaacataacttacttaggggagatttgtaaatgtttattttggataagctatgtcttatttttgttttgcttttgagaaagatacttctcattctttgctaatttcaaacaaacagctttatagtagaaagcaattatttctataactcaagttaaataattctgtctattctttagtcaaattgaaaataagacataacaaaacaatgacccccttgc

SEQ ID NO: 8465 - DNA, 241 bp, synthetic construct
  misc_feature 1..241: note = Description of artificial sequence: synthetic polynucleotide sequence
  source 1..241: mol_type = other DNA
cttggtttctaacttttcagaggtgaacacaaccataaatggtaactaacttacagtagtgcctactgtatccactaagcattatgtagaatacagaggtgacccagacatgcaccctgcccttaaaaaacatgaagattgaaacatattatcatgatttacaggcatagctcctcctcctccaaaaacaaaacaatacaaaacacacaaataactgtgtttgtcagaaatacagacacca

SEQ ID NO: 8466 - DNA, 240 bp, synthetic construct
  misc_feature 1..240: note = Description of artificial sequence: synthetic polynucleotide sequence
  source 1..240: mol_type = other DNA
agtgttaaaatgtcagaaaatagggcagcttgaactcaacctttgcactctctagcacttgaattatattttatcaaacctttgttaagttagttcatgtattttggtgcctcagtggttctaatccaagtatagtatttttgtagatccatctgtcccagtgctgcataacagcactagaacatgtggaagagatttaacaaatagtattagctatgatatgtatatattagtatatat

SEQ ID NO: 8467 - DNA, 240 bp, synthetic construct
  misc_feature 1..240: note = Description of artificial sequence: synthetic polynucleotide sequence
  source 1..240: mol_type = other DNA
tacatgtcaggaagtgttctgagttctttacgtgtactaattcatttagccttcccaataaccctatgcggaaagttattaccatcttctcttgacagataaagaaaccaagccacagaaagtttaggtaacttggccgaagtcatgctactaataagttatggccccaggatgtgagcacagtttgacttcacagtttgctcttataccctacactatgctacccctaaataattattc

SEQ ID NO: 8468 - DNA, 479 bp, synthetic construct
  misc_feature 1..479: note = Description of artificial sequence: synthetic polynucleotide sequence
  source 1..479: mol_type = other DNA
gagtcatgttaatgaggggattttaaaaacttgacagtattggaacagtatatatagtaagctgatacttccctgggttggacaactccagaagcaatctgatgtttgtttgcctgtatatttttgtttttctaggcaatgggggctaatctcactagtacttctgtagactgtctagcatatgtctttcggtgaatctttgaactcgttttccatttggtatatatctgatggtacaattgctgaattcttggtatatacataagaatagaatttctaggtcatggtataggattgctggaaactgtaccaatttgcattcccaccagcagggcataggagttccagttgccttgcatttttcccaatattttctgcctctttcattttaggtgactatgcagagacatcacattttggttttaatttgcatgactctgatgactaatggagtcaaactcattttcatatatttattg

SEQ ID NO: 8469 - DNA, 480 bp, synthetic construct
  misc_feature 1..480: note = Description of artificial sequence: synthetic polynucleotide sequence
  source 1..480: mol_type = other DNA
gccatttgtcaataaagttttatgaggtgtcttttcaagtgatttgcccattttttaaattaggttttctgcctaattcctaattgtgtaggaattcttagcgtattctagatacaagcccttcgtcagagacataaactgaaaatctcttctcccattctgcaggatgtctgttctctcttcacggagtcttttgaggaagtgaagttcttactttacatagttcaatttaccaatttttttcctcatggctagcacttttttgtgtcctgtgtaagcaaactttgcctactccaaggtcatgaagatttcttccatgttttcttctaaatctctatcattttatttttcacatttagatctgtaatccttctggaattatttttttgcatatggtgtgagataggagttaaaatacattttcatgtggacattcaattgtccctacaccatttactgaaaataccatcctttccccca

SEQ ID NO: 8470 - DNA, 360 bp, synthetic construct
  misc_feature 1..360: note = Description of artificial sequence: synthetic polynucleotide sequence
  source 1..360: mol_type = other DNA
ctatactgcagtgtcacctttctcataaactagttgactatatctatacctatgtctctatctatgtctatctacctacctgtatatatctgtttatggagtctgttctattacattgatcagctcatttgttttttttttttgtctagaaaattttgctaaagcagtattaatgagtttgaatcttgcctcttggggctgtgacaacacttcaggttgtgattcctcacctgcagccctatccatgccatggcaaccaccgaggcatccatcctgtggttatctatacaatgcataataaagacctcagctggcctcggcggctcacgcctgtaatcccagcactttgggaggccaagg

SEQ ID NO: 8471 - DNA, 240 bp, synthetic construct
  misc_feature 1..240: note = Description of artificial sequence: synthetic polynucleotide sequence
  source 1..240: mol_type = other DNA
aaaaaaagataacctctatctcccactgctttcccttcccaccgtcaccccaagtttctgtcatttctttgaatttgttatttgactttccacaagtataaaagtacacttgtatcatttattttaggtattggatatcttcccttccttatgtattattttaaaagcagctaaataaaaaatttagcttggtttttgttgttgttgttgttgttttgtttttttggttttttgagacgg

SEQ ID NO: 8472 - DNA, 240 bp, synthetic construct
  misc_feature 1..240: note = Description of artificial sequence: synthetic polynucleotide sequence
  source 1..240: mol_type = other DNA
tgcatgccaccacgcttggctaatttttttttttttgtatttttagtagagacggggtttaatgtagccttcaaataatttttttaactataaattcagtggcttttgatttttcaaaaagagtctccactcttacctaaaactacaatgggtatttgaattctagaaggaggtgattttattccaaactgataatcactataaaacattatgtcttttctactggaaatagaaatacag

SEQ ID NO: 8473 - DNA, 241 bp, synthetic construct
  misc_feature 1..241: note = Description of artificial sequence: synthetic polynucleotide sequence
  source 1..241: mol_type = other DNA
tgtatatagatgtttgttagacatctctaataaaaaaatgagtattgtatataactgagccttcctagaatgtttgcccacagccacagtgttatagcagttcatattatctctctcatggtcacatgttagaagtagagtcatgtagcagtatgcaagcaaatcccctgttgggatgcctgttggcttcagattagctcacttactgggcaaaacagagactatgggcaatgcccaacat

SEQ ID NO: 8474 - DNA, 240 bp, synthetic construct
  misc_feature 1..240: note = Description of artificial sequence: synthetic polynucleotide sequence
  source 1..240: mol_type = other DNA
ttcctcatttctcataatggcttatcaaattcccagtcacaagagctaaaaccttagaacaatcttttactcttccctcttccccatggcacagctttaacatcgactgaagcttcttttatagaattgtttctccggttccttttttgtgaatttattgttactattctctctcaaacttcatataggatgttgacagtgacttaagcaataagaaagattatcacataaaacaaaaca

SEQ ID NO: 8475 - DNA, 241 bp, synthetic construct
  misc_feature 1..241: note = Description of artificial sequence: synthetic polynucleotide sequence
  source 1..241: mol_type = other DNA
aaacaaacaaacaacagcaacaacaacaaaaaatatatatatacacacacacaggtaggatggccctgtccctgcttctctgcgatcctctttgttctaccctactggtggatctatacccaaactggcagcaagatagcttggcagttccaggttacacctagcagaccacatctcatgtctcactggccagagtcaggtcacatacccatctttaagacagttgttggcaaggatttac

SEQ ID NO: 8476 - DNA, 239 bp, synthetic construct
  misc_feature 1..239: note = Description of artificial sequence: synthetic polynucleotide sequence
  source 1..239: mol_type = other DNA
cctggagccagggatgaaaccatcttcccctgagtcacatgggaaaggacacctgaacaaaattagcgtcttgtcaccatagggaatgggctctgaatgctggtggataatcaacagtgtcagctccagactctaaccacttcacttagataactgcagccacctcttaactgtggtccctgcctccagtttttggctccatcttctcaacatgtataatgaagccagtacaattctcc

SEQ ID NO: 8477 - DNA, 240 bp, synthetic construct
  misc_feature 1..240: note = Description of artificial sequence: synthetic polynucleotide sequence
  source 1..240: mol_type = other DNA
ttaaacacactgctgtcatgacagcactttcttggtcagggggcctaggtggcttcactgtgactgatggacaaaattcgaacaccttggcctccccattcaagatgtccacaaccagactccaacctatcccttatccttccttctccctagttccttacaacaggggtggtagtaaatatatcaggctttgtggaccatgtggtctctgtcacaattacagtaatattcccctcatct

SEQ ID NO: 8478 - DNA, 121 bp, synthetic construct
  misc_feature 1..121: note = Description of artificial sequence: synthetic polynucleotide sequence
  source 1..121: mol_type = other DNA
gtacagtagaataagttgttctgagaagaagaaggagaaagagagagagaccacattcataccacctttattacagtacgttgttataattgtcctttttttttttttttttttaactctt

SEQ ID NO: 8479 - DNA, 360 bp, synthetic construct
  misc_feature 1..360: note = Description of artificial sequence: synthetic polynucleotide sequence
  source 1..360: mol_type = other DNA
tattttattagtagtaattgttgttaatctcttactgtgcctaatgtataaactttatcttttctttgcttatctgtctttccacaagtataaaagtatacttttaccatttattttatgtattggatatctctctaaacaaatcacaggtatgtatgcataggaaaaaacacagtatgtgtagggtttggtactatgcacagtttcaggcattcacttggggatcttggaacataacccctgcagataaggaggggactactgtagtcaattcttcccttgtagtgcaaaagcagccatgcacaatacaatacaaatgaatgtgactgtattccaataaaactttatttacgaaacagg

SEQ ID NO: 8480 - DNA, 121 bp, synthetic construct
  misc_feature 1..121: note = Description of artificial sequence: synthetic polynucleotide sequence
  source 1..121: mol_type = other DNA
cagtaaactaaatttggcccacaggacacactttaacaatccctgccttacatgaaatcccttactccactaggccctaagttggtaaaatcaacactccattggagccacaaagatgaca

SEQ ID NO: 8481 - DNA, 359 bp, synthetic construct
  misc_feature 1..359: note = Description of artificial sequence: synthetic polynucleotide sequence
  source 1..359: mol_type = other DNA
acataatggtatggggaagtcctacctacacaggacatctggcagggtccgggcttcatgtctgacatatcgtcaagagttacattggcaatgagactagttttcgtaaatttattcagtttgatcattcagctgattcaaagatcaaaagatcctttagggctgtgttttctgacctttttaaggctgtggtacatggatttgttaggctaactgagacaaataaatgagtttgtctcttcactatgctgataataccttggcaagtcatcagtcaagctctttttctcacccttacccccagatctacaccctgctcctacaatcttatctctgtctccttctcccttctaaaagaa

SEQ ID NO: 8482 - DNA, 479 bp, synthetic construct
  misc_feature 1..479: note = Description of artificial sequence: synthetic polynucleotide sequence
  source 1..479: mol_type = other DNA
acctgatgaaacaaaaagaagaaacccagagataataatacacccaagatcatactgatagacctacatgtgccaaacattggttgagaaataatgtcttgtgatccacaataatcagtaccaaaaatccaagtacttcacgcggtcttaggaaacaaatatgtgggaaaggctgaggcttggcttatttagttagcttttgttttagaactacataaacagagagtgtaaatagtaacctgattaaaaatacggactttagggttagtttatctgggtttgaattctggttctgctgcttcctgtttatctgacctttggtaagtgacttaacttctttgtgtctctatttcttcatctacgtatctgacccagagagttgttaggataattatgtgaattaatatgtgcaaaaatttaaaaatagggcctatcacattgttaacagcatatatgagttggtaaaaggatatatatat

SEQ ID NO: 8483 - DNA, 121 bp, synthetic construct
  misc_feature 1..121: note = Description of artificial sequence: synthetic polynucleotide sequence
  source 1..121: mol_type = other DNA
atgttgcgtcttaggcatggagtaaaattcatgtaaacaaaaaaacagagtgaatattcacttaggcaggcagtctgctccatgtaatcattcaaggattcagatagacaacggctctgcc

SEQ ID NO: 8484 - DNA, 358 bp, synthetic construct
  misc_feature 1..358: note = Description of artificial sequence: synthetic polynucleotide sequence
  source 1..358: mol_type = other DNA
atcttcaacatgtggtcttcaaattttccctggaggtctccatacagttaaatagactagaagggcatacagaatctcagtgggagatttttatgcgctagatttaggaatgatgcgcataatttcctttcacattccattagttagaatttagtcacatgaccataacctaatcccaagggagactggaaaatgtagggtagcttcccaggaggaagaggagtatatagatttgatggaagacctatcagaattggttataactgagtatctggacaacaccatattggtactggtatcctagcaagaaaagtgtacattgaattgtagtatctatagtgccattagcctttcatga

SEQ ID NO: 8485 - DNA, 121 bp, synthetic construct
  misc_feature 1..121: note = Description of artificial sequence: synthetic polynucleotide sequence
  source 1..121: mol_type = other DNA
agttattttaataaaacaacttttttgaaactagttattaaatacggtctaaaaataatgatgaggaactctttatttcattacctagtgtgctttctaaagaacactaggaaaaatttcc

SEQ ID NO: 8486 - DNA, 359 bp, synthetic construct
  misc_feature 1..359: note = Description of artificial sequence: synthetic polynucleotide sequence
  source 1..359: mol_type = other DNA
ctttgaccttaatacaaacacacaaacacaaaatagttgtgtttccccgagtgaaaagttgcttagctttgcccctgctccccaaatcttggaaatattattaattgtttaactgtccaagcttggcttagaaagcttagaatcaattttattctttcactcaactaatttactgagcatttactacatgtcaaacttcaagctagacactgaggattcaagagggaacaagacagacatggttcttgccctcatggaattcacattctaataaggggtcaaggaagtggatgtgtggaaacatataacgaataaacaaatgactatataaatgcagcaataccaatcaataagggacc

SEQ ID NO: 8487 - DNA, 360 bp, synthetic construct
  misc_feature 1..360: note = Description of artificial sequence: synthetic polynucleotide sequence
  source 1..360: mol_type = other DNA
aagctaaataattgccaaattgggaaccaattttaaatgggatggctgggacaggggcttcttcaaaaaggttgaatttaaaccgagccagccatacaaaagggcgtacccccagcaggaggcacaatgtgcacaggagctttgatgagagattgagttaaggagttcaagggctagaaaggaggccagggtgactagagagtggagagcagagcagggaggggcacaagatgagactgtgcatcacgcaggcccgtgacagccatggtgaagagtccaaattctgttctaaatgcggtgggaagtggttgcaagtttttgtttgtttgtttttgtttttgttttgagacagagtctcgc

SEQ ID NO: 8488 - DNA, 479 bp, synthetic construct
  misc_feature 1..479: note = Description of artificial sequence: synthetic polynucleotide sequence
  source 1..479: mol_type = other DNA
tacaggcgtgagccaccgtgcccggtcagttgcaagttttaagtagggggaaatgattgatccagcttgtgttatgagatcatttgggctgcagtgtggaggaagaactaaaaggacatggaagcaggaggacagccaggtgatgggtgtcgtaagcctgggaaatgtgatggtaatacaagcatgtcaagcccgcagatcctgacagtaagcatgccttcctgacttgtgcccggggagaggaggcgacagtgattctgacctcttcttatttccctccctttctagcgccactttcctgagcttttttactgtatgttatgtataccgtatgctgtatgctgtatgctgtatgctgtatctaacagcccttgtaaacagccttaaatcctttctaaacatcctggatagtcctagaatcctagaatatggattctttcttggtttcaaaactgatttcattatattgcatggaaaga

SEQ ID NO: 8489 - DNA, 478 bp, synthetic construct
  misc_feature 1..478: note = Description of artificial sequence: synthetic polynucleotide sequence
  source 1..478: mol_type = other DNA
agaaatgtctttattgtagagtgttggtatttctgggtaggttgattcaaagattaagttgtgagggcagttgggacttttagagaaagtggatctagaaaatctaaattgttactaagaaatattgatgaatgtaggtcatggagctcagaaagaagtatctctttgatatttttcctaaactatgtgaaagggaagcaatgggaaatttcgtgaacggagtcaggaaagcctcaagttgggtggctaggaagggtagaggagttgctattagggaaccgaggagtgaatgtggagatggtgaagtgagacaggaggctgcttcctcaaaagtcaggacagttatgagaatgctctggtttgaatgtcaagatgttactggaaatgaataactacaaatacacgcatgttcatgcacacacacatacacaaacacatgaagctattgaaaagaatatgcagcaaatgtgttttgtaa

SEQ ID NO: 8490 - DNA, 241 bp, synthetic construct
  misc_feature 1..241: note = Description of artificial sequence: synthetic polynucleotide sequence
  source 1..241: mol_type = other DNA
gtgagctagtatctagttgaagtaccatgatcatctttaaaatctcttgctagaagaggaatgttgactgcccagtgtgggtgtggatagggaatgaatatcctcgctgtggtatccataattgaaatgcactgtgcctcatctccagaccagcccttacagcagtgccaatctccttcttgtccactgcacaatagctcgctgactctgcctactctttggtcagtttcccggatatcct

SEQ ID NO: 8491 - DNA, 240 bp, synthetic construct
  misc_feature 1..240: note = Description of artificial sequence: synthetic polynucleotide sequence
  source 1..240: mol_type = other DNA
tgtctcttcattcttagtacatcacatcattactcaggcctcttgcctgggcccctggcagctttaggtacctcattcagcgcaactgttttcctgttttcttgagcagtgaggtcataatttcatgaccttggatacacattgcgtgaagtaaaatgtttattaagtcagatgaattaataacattttcaggaagttcataattgatggagacaaattacatatgtaccatacatcaac

SEQ ID NO: 8492 - DNA, 241 bp, synthetic construct
  misc_feature 1..241: note = Description of artificial sequence: synthetic polynucleotide sequence
  source 1..241: mol_type = other DNA
acacacacacacagaatgtgcacactcaggagagattaatagtgtgtatgtttattagatataaagcagctgtagcctatgaagaaaggacagaagaaacagcgaggtacaggaactagagtcgacaaagaagaaaagcaaagatgcccacatacatcctacttttaatgcaaagcttgtctctgctggataacatcacaaatcccccaactaaaatcaccaattgttctgtccctaaaga

SEQ ID NO: 8493 - DNA, 239 bp, synthetic construct
  misc_feature 1..239: note = Description of artificial sequence: synthetic polynucleotide sequence
  source 1..239: mol_type = other DNA
tatctttctagttctcaatcccaggccaggtggggctctatttaactctcttttatttaatccacttttgatcactcttaggaagtttcactttactcaacaagctcaagattgatcacccttgactttatctgtttatcttaggagtgtttggttgaagacagaaccacagatgcccattattactagtattatcataacaataaagaggagcaatagtaaataaaggaaacccagag

SEQ ID NO: 8494 - DNA, 241 bp, synthetic construct
  misc_feature 1..241: note = Description of artificial sequence: synthetic polynucleotide sequence
  source 1..241: mol_type = other DNA
ccagattatcgggacttaaatctgttttcccacttttgtgatgtttgaccttcagcaaattatctaccttctctatgcctccgtttccctattcataaaatggaaacaatgaaagtacctacctcgtagggtttttgtgagagttaaatgggttcatacacataaagtacttggatctgccctggcaatatttagacctctgtgaatagtaacctgtattactgcgtttcagttaggaatg

SEQ ID NO: 8495 - DNA, 239 bp, synthetic construct
  misc_feature 1..239: note = Description of artificial sequence: synthetic polynucleotide sequence
  source 1..239: mol_type = other DNA
actaaatgttgcggcaaactgcacattctgttgacccttcctggtcactgctcacccatccgaagcctgtgtaatacaatattcaactctgaaactgcatctaaggtggccaggaaggaaagctggagggaaatgtgtagaccagctgacctctattttaggttgaaggtccaggcatttcctcccctttctctacctgtgagaggagccaaccagagctggccaagccatgatgcagc

SEQ ID NO: 8496 - DNA, 240 bp, synthetic construct
  misc_feature 1..240: note = Description of artificial sequence: synthetic polynucleotide sequence
  source 1..240: mol_type = other DNA
ccctcgtgtggccatttccttcccagcctctattcatcttttaccactctctagcagcagaagctggtgggttgtggttaccactcttgtttgttgccccacatcccagcttcattttctcaggatcactgccaggcaataaggaaagtttggggcctgaaaaaatctgccccaggcctgtgtagagcaaaatacccttggacattatacccgcagaaggttcctcaaaattatgtgaca

SEQ ID NO: 8497 - DNA, 239 bp, synthetic construct
  misc_feature 1..239: note = Description of artificial sequence: synthetic polynucleotide sequence
  source 1..239: mol_type = other DNA
tttttcagctgatcgaacttccctaacctgacttcctggaaaagccaagaattcagagaaaatgtagggcactgacgaaccaatgaagaggtcagtaaattctcccggagtccccactcaggtctgaaaaatgttgtgtgaaacctgtgggtagggatagcctccaaatatttgccctcccacaactgtccataggcctagttgccctgccatagctaggtcccaaattgttgcaaaag

SEQ ID NO: 8498 - DNA, 480 bp, synthetic construct
  misc_feature 1..480: note = Description of artificial sequence: synthetic polynucleotide sequence
  source 1..480: mol_type = other DNA
ccataaagccatatccatgtagattctgccaaaccagctaactggccaatctgttttcccacaacatgagttaccttactgggatgtgcgtcttcaggtatatgcacttggatccagttacagcaagttaccccaaggaaataatcagacaagggcatagagctgattgtgaagggtcattcatggtgcccatggttttgtaatatcaacacttacaaattagaagcaacctaaattgccatcactaggggatggcttaaacaaactatggcatacccatacaataaaatatttatcagtctttataaataatcatggggtctgtaattaccaacatggaaaaatgcccatgatacccttgaaaagtgataaaacagttcacggaattacattctgatataatggtacttattaaaattgcattctccagcctgggcgacagagcgagactccgtctcaaaaaaaaaaaaaaaaattgca

SEQ ID NO: 8499 - DNA, 479 bp, synthetic construct
  misc_feature 1..479: note = Description of artificial sequence: synthetic polynucleotide sequence
  source 1..479: mol_type = other DNA
tcatatgaatggtacctattaaaattgcattgatatgcaattttaataagtaccattatatcagaatgtgtccagggatctacagaaaattatgttcacaaaaatactgacagcaattatctctgtggttgagtatttgggtaatatttactgttattttttacttttttttggtatttagaaaacacttagcaatgatacaatgtgctatctgaaaaaaactaaactttttaaaatataagtttgaggggaaaatgaactaagttagtaatgttttgggaataagatcatgggttggccacaccaagcaggtaatggcacaaggataagataattaacatttattaagcacttattacatgccagcaggccctgttctaagcactttccgtgtatcaactcatttcatttgcacaactccacaaagcaagtcttttatggtgcccattttacagataatgaaatgaaacaggcaccaa

SEQ ID NO: 8500 - DNA, 240 bp, synthetic construct
  misc_feature 1..240: note = Description of artificial sequence: synthetic polynucleotide sequence
  source 1..240: mol_type = other DNA
gagaggaagccgtttgtttgaagtcttacggctggcaggaggtgaaacagagatttagacagaggtctgcttccaaaatctctgagcgtgacccctgtgctcccctgcatagggctggctttcctgcaggggaggagggaaggtgctgaggtcagaggaggagagaggaatgatggagggagtggagagggcagaggtggctgctgacgatggggaacaagacactgtcctcttccccct

SEQ ID NO: 8501 - DNA, 239 bp, synthetic construct
  misc_feature 1..239: note = Description of artificial sequence: synthetic polynucleotide sequence
  source 1..239: mol_type = other DNA
gcagttcctgaaggatcttcattctcccactggccacctgtttacctaacccctctaaagcctcagtttcctcttttgtaaagtgagggagccttctcaggccattcaccttaattagttcctctctatgccatataaagtcctagaagccagttctgctgtggcacatatgcagccaccaccatcatcaccagcatcccacttccggctgagagacgcaggccccggtgtctcccagt

SEQ ID NO: 8502 - DNA, 240 bp, synthetic construct
  misc_feature 1..240: note = Description of artificial sequence: synthetic polynucleotide sequence
  source 1..240: mol_type = other DNA
gtgcaagttgtcagagcaggctggaagagaattgggcattctctgtctctgctgtagaatgaccaccctgaaggataattctgctcacttgttattctcctcactggacaggagaccctggaagcagagacaatatctgatgcacctctgcattcccactacctggaacataaagtcgttcaataaataaacatcctctgttgaatgaataactggaaagtacagccatgtggccttatg

SEQ ID NO: 8503 - DNA, 240 bp, synthetic construct
  misc_feature 1..240: note = Description of artificial sequence: synthetic polynucleotide sequence
  source 1..240: mol_type = other DNA
attccagagtaacaagtaggaaaagcaacacttgcatattaatttctttattttttgtttctgttttctaccttatctggcacagagttcagagtaggtacagtcattaaagaagtcactgatttttaacatgccacttaagcaaaaggagcaagaaggccctatttatgttgatcaactaattcaagaaattctgggcttttgttttttcttttcttttttctttttctttttcttttt

SEQ ID NO: 8504 - DNA, 359 bp, synthetic construct
  misc_feature 1..359: note = Description of artificial sequence: synthetic polynucleotide sequence
  source 1..359: mol_type = other DNA
cccaccttggccatccaaagtgctgggattacaggtgtgagccaccacacccagccaaattctaggctttctatgtaaattataaaatgtaatttacaaaactctgttcagacattttatcaccaaggcagagagtggtcaaatcacagagctagtaaggagtagaaccaaatccagcttctctgcccttggtgtcaactgctttttctactttccacatagctccacccctccagccagtcacaatggtttctaaaagtggacctgcctttgcagttattcattcaacagaggatgtttatttattgagcaactttatgtttcaggtagtgggaatgcagaggtgcaccagatattgt

SEQ ID NO: 8505 - DNA, 479 bp, synthetic construct
  misc_feature 1..479: note = Description of artificial sequence: synthetic polynucleotide sequence
  source 1..479: mol_type = other DNA
ctctgcttccagggtctcctgtccagtgaggagaacaacaagtgagcagaattatccctcaaggtggtctttctaagcagagacctgccttaattctgttgccttaggtgagatcaacttacttctgcatgcttccatttctcctcccccttggtagattgagaatcatggtatcagctcttcttagtgaaagaaaatctaagaaacatagacaggtgtccacatcttgaagtagctgaagtttgtctttgggttctcagcttccttttctccctcttgcttacttcccttcaaggattgctgccatcagtgtcatcaaacccagggattccctaatgctaatccaccaattagagcacggctggttactacagaaccactgatgagtttcaaaaaatgcagacttctggaccccacccttggagattttgaatcaggaggtcttaggtagtgcccaggcacctctatgtttcaggttc

SEQ ID NO: 8506 - DNA, 480 bp, synthetic construct
  misc_feature 1..480: note = Description of artificial sequence: synthetic polynucleotide sequence
  source 1..480: mol_type = other DNA
cccaggggattctaacctgcagccatattggggaaccactgacctaacacgaaaacatgagtcagctgtctcaactgtattgaaagtgatgaatcatcatttcactttaaaaagaaaaaaatatgagctgaaaccaaagtcattgtgagaacctttcatttcctttacctgagtttgaattcaggtttcctttacttgagtttgagtttagaagtcttctatacttggtccaagcatttttacggagattcccaaggtcttaaggcaaacagacttaagacctgtcctcagtttagtcctgggaacatgctgtaaccctgatcagccctggctagggggaccctgggaaactggctggctctggagatccttcaggccagagttgctgggaaccacaccgggttcatcttacaccatgcctaggtgctggggtccaatagtcttgtctcctctggcttcccagagccagaactaggaaga

SEQ ID NO: 8507 - DNA, 121 bp, synthetic construct
  misc_feature 1..121: note = Description of artificial sequence: synthetic polynucleotide sequence
  source 1..121: mol_type = other DNA
cgagaaggctttgggatatggctggcttccagagactgaatcagcaactcatattctcaagaccgaggtgggtaggcctgacacagaagggtcaggaggctgctagaatctatgacagggc

SEQ ID NO: 8508 - DNA, 240 bp, synthetic construct
  misc_feature 1..240: note = Description of artificial sequence: synthetic polynucleotide sequence
  source 1..240: mol_type = other DNA
aggaacagcgctgaggcagcagaaactgagaaagcagaagtcaccagaaagagaaaagaagttcaaagtagagggaaagactgaggaaataagcagggtgagtcgaacagatgagatgtgcagagagaagcagatatgagctgagggagagagactcaatgaaccacgagaggtgggcaaagaaagcagccagtcctgaggttaccttgtttctgacagtttgggtcctgcccatccttt

SEQ ID NO: 8509 - DNA, 479 bp, synthetic construct
  misc_feature 1..479: note = Description of artificial sequence: synthetic polynucleotide sequence
  source 1..479: mol_type = other DNA
ttcttgtcaggtttgtcaaagatcagatagttgtagataggctgcattatttctgagggctgcccatccttatatcaccaattcaattgaggagactcgaccaaatgttttatttttctaataactgttgccagtagtattctgggaaatccttctagcctgttgggcagtgagtgaccctcatcatatatcagtgcaatttcatgatttgtagatcacttattatgactcagtctagtcccatgttttctaatagcttttgagatctaattcatataccatgcaattcactcatttagagcaggggttcccaaaccctggactgtgaaccagtacccatccatggcctgttaggaactgggctgcacagcaggaggtgagcacccagcaaatgagcattaccacctgagctctacctcctgtcagatcagtggcagcattagattctcatagcagtgcaaatcctgttgtaaactgag

SEQ ID NO: 8510 - DNA, 240 bp, synthetic construct
  misc_feature 1..240: note = Description of artificial sequence: synthetic polynucleotide sequence
  source 1..240: mol_type = other DNA
catgcaatggatctacgttgcttttcttatgagaatctaactaatgcctgatgatgtgaggtggaacagtttcatcccaaaaccatttccaccacccttcccacaatgcacggaaaaattgtctacgacgaaactggtccctggtgccaaaaaggttggggattgctgatttagagcatacctttcagtggtttttagtatatgcacagagttctgcaaccaacaatataattaattttg

SEQ ID NO: 8511 - DNA, 239 bp, synthetic construct
  misc_feature 1..239: note = Description of artificial sequence: synthetic polynucleotide sequence
  source 1..239: mol_type = other DNA
aaatattttcatcatcccaaaatgaaatcccatccctctagcagtcaccccctagttcccctcattcctcccagtcttaagtaattatttcctgtctctatggatttgcctattctggacatttcgtctaaatggaatcatacaatatatacaatcttttgtgacaggcttctttcacatagcataatgttttcaaggttcacacacactgtatcacgtatcaggactgcattcatttc

SEQ ID NO: 8512 - DNA, 240 bp, synthetic construct
  misc_feature 1..240: note = Description of artificial sequence: synthetic polynucleotide sequence
  source 1..240: mol_type = other DNA
taaagctgagatatattccattgtatggacatactgttttttattgtctcattcatcagtctctggacatctggtttgtttccaattttttgatactaagaataatgcttctatgaacattcatgcagacatttttgtgtgtacatttcatttcttttgaaatatacctaggagtagaacactgggtcgctatgtttaacattttgaggaagtgacagagttcatctcatttaaaattcc

SEQ ID NO: 8513 - DNA, 240 bp, synthetic construct
  misc_feature 1..240: note = Description of artificial sequence: synthetic polynucleotide sequence
  source 1..240: mol_type = other DNA
aatcccatattttacaaatatgagatattttacaaatatctctcctcccagaataggtgaaacttatgaccctgcaatcttcaagttgggcagagaaatggctcaggtctcaggcggttgcagtctaagggtagtggcctgtgataatggctggggcctcccatgcctttggcttccttctcttctgcatcacacgaagccatagtaactgttggggtttttggtcatccttgaggactc

SEQ ID NO: 8514 - DNA, 240 bp, synthetic construct
  misc_feature 1..240: note = Description of artificial sequence: synthetic polynucleotide sequence
  source 1..240: mol_type = other DNA
aggagcctgggatgtgaatgatatccccattttcttcattcctgaaaataagtctacagcccttttcactccccgggtgtgggacacccagtgaacctcccattttcagaaacttcaggcaagaagcaggtattaatctctatacaaggcactctcaaactttggagatatgcgtttagcaccccttttctctccccaagaatgagaggagactcagataatatacatccactctaggct

SEQ ID NO: 8515 - DNA, 240 bp, synthetic construct
  misc_feature 1..240: note = Description of artificial sequence: synthetic polynucleotide sequence
  source 1..240: mol_type = other DNA
ctcggaaccttctccctgtctcttagtctccttcttacttgtctttgttcaaggccagtgggccagtttaatttctctcctcctcctctcttctctcctctcatttcctgcccccaaccctgcacttgaaagactcattgaaggaattaggcctgactttattttttttaccatattaacaaaacgatatttctttttgaaaaatttatttttattatttttaaagacagagtcttgctc

SEQ ID NO: 8516 - DNA, 359 bp, synthetic construct
  misc_feature 1..359: note = Description of artificial sequence: synthetic polynucleotide sequence
  source 1..359: mol_type = other DNA
ccactcctggctttttaattatttttttaattgacacataaataattatatagatttatggagtagagtgtgctatttcgacacatgtctaagatgtattataattaaatcatagtaattagcatatccatcatctgaaacttttatttctttgtgttggaaacactcaaaatcctctcttctagctatttgaaaatatagaatacattgttgttaactgtagtcaccctacagtgctatagaggccttacttaaatttgacctttgtgagttcagtaacttttcctcaacaagaagccatctacccagttatttcttcactattcagtaacatggggcagaaaaaaatacttaatcag

SEQ ID NO: 8517 - DNA, 361 bp, synthetic construct
  misc_feature 1..361: note = Description of artificial sequence: synthetic polynucleotide sequence
  source 1..361: mol_type = other DNA
tgccccacatcaatctgttacacttataataaatctctttttattttgaaaagttcttttctgtgaatgagccaaacctagacctctctccttctaagaacaaacaagtatttcagttgctccggccagaacttcaattcacacctttccttctcttactttgagaccaggcctttcttagcacatagagaccaggtgggactgcaagccaagtgtggactttgaggatgatgaccagtgactcacctccagcccctggctgaccatgacacaagggaggccaattttcgggctggcccccatgtggtctccctcctcctcctctcttcccccagctgctcatgacctgcctgccccaccc

SEQ ID NO: 8518 - DNA, 241 bp, synthetic construct
  misc_feature 1..241: note = Description of artificial sequence: synthetic polynucleotide sequence
  source 1..241: mol_type = other DNA
gcttccttcacattccagataaactcacagcagatccctgcttcctgactttggaaacgttgctaaagcaggttctagataaactgctgcctcctcatttctcacaccttccttagctcttgctctttgcctgttttcccaaaattcaagtgcatttctttctcatcctcaagctgtatttttttcccttataaaaccaagcagagtgggaaatactggacttatttttttggacctgaaa

SEQ ID NO: 8519 - DNA, 478 bp, synthetic construct
  misc_feature 1..478: note = Description of artificial sequence: synthetic polynucleotide sequence
  source 1..478: mol_type = other DNA
gcattaacattgatttagcacctgctgtatgacaagcactgttctaggtgatttacatgaatatttacatcatgtcatattacaatatattacattacatcgcatcacatcacatacattgtattgcatcatattatattacattgaactacatttgcattacactgcatttggaggaaaatatcttgggaggaaaggacagaaatggttgtagcatttcttacctactctgccctacattcacagggtgatcttggttaagctctgtaatctctctttgtattaactttcccttctataagataggaggggcctcatagattggctggtgacataattattaaactcattatattcttattatagtctaatagtttatgaccaaaattctaattttctatttccaagtgacaatgcaatgttgaagggggtgcctaattctacacacagacacacacacacaatttagctatgcctc

SEQ ID NO: 8520 - DNA, 478 bp, synthetic construct
  misc_feature 1..478: note = Description of artificial sequence: synthetic polynucleotide sequence
  source 1..478: mol_type = other DNA
tcaggaatcttctattaaaaagagaacaaagctaaattaaataaattgccagccaggcatggtggctgacacccgtaatcccaacaatttgggaggctgaggtggatggatcacttgagctcaggagtacaagactgttaggttttgaagggaaggcgagacttaaagaaagacacacacacataagagggaagttcaacaacaaatgcagactttatatccagcataaaacctacagaagtcagagaccagtctaatgccagtacctgctgctgcttataggctggggcaatttataggtatgggcaggaggggtctgggcagtatggcttgctgcctggcaggaaattgataagatggtcccatgatgaggcagttctggtccttgttcaggcaggatgtcatcatggtgttccttggacctttgcccagaaggtctttgccttctagtttagcataaaaaggaagaggggcattg

SEQ ID NO: 8521 - DNA, 478 bp, synthetic construct
  misc_feature 1..478: note = Description of artificial sequence: synthetic polynucleotide sequence
  source 1..478: mol_type = other DNA
ttaattatctggctgtttcctgctaaataggagcactgcactcaggctttgggttttcagcagtgggtgtccgactttagagttgttttcctggaagtgctgataccaaacttggcagagaagaatggtatcgtgtttctatatagctgcctggacaagggagttcggcctttgggagataaagcgggatatgaaggtgcgcacacatgggccaattgtcagtattatgagggagaaaattagggaccctaagacaggggttacccaaggtatccactttaggaaggatgacccctgccaacagtgaatgacttgatgttggatttctgcagccgtgtaatggagcctgtgggctgcgttgcgaacaatgccggcttcattaacataaaaacagcattcttcttggacatatacacatgtgccccaagacaagaatgttaatccaaactgcaccattttgtaagcgccctgctatttt

SEQ ID NO: 8522 - DNA, 360 bp, synthetic construct
  misc_feature 1..360: note = Description of artificial sequence: synthetic polynucleotide sequence
  source 1..360: mol_type = other DNA
gcagaccttggtaaaagtgacacatttcatgggtttttgggccatgagaaacaccctgcctaaccacttgaccacaaggcccacaaaggcccaactaaagaaatatctctatcatatccttctgggcaaaggtccaaggaacaccacgatgacatcccgcctgaacaaggaccagaactgcctcatgacgggaacatcttatcaatatcctaccgggcagcaagccatactgcccagacccctcccgcccatacctataaattaccccagcctgtaagcagcggtaggcactggcgttaggctggtccccgacttctacagtgtgcatatttctttaaccctcgccttcccttcaaaacc

SEQ ID NO: 8523 - DNA, 360 bp, synthetic construct
  misc_feature 1..360: note = Description of artificial sequence: synthetic polynucleotide sequence
  source 1..360: mol_type = other DNA
aaacacatacagccctttgttgatttctttaaatgttttcttcttgttatttttcagtaatctaactatactctccattattgcttttaaaaaattatttctgtctttacaaaagtaatttgtgctcatggcagactatttaaaaaacaaaatgaagccaaagaaagaaaataaaaattaactgcaggagaaggaggcaagagagctaactagatgcagccaggagaaacacctctcacagagatcttcccagattttcagagggaaggcatcaagagtggacagagggaagacacagaggctgggctgaagcaggaggaagctgaaaaccctgcatgaggctaccacacactgggactt

SEQ ID NO: 8524 - DNA, 479 bp, synthetic construct
  misc_feature 1..479: note = Description of artificial sequence: synthetic polynucleotide sequence
  source 1..479: mol_type = other DNA
gttcctggcccccaacaactcctgcagaagggatgagttgaacaggcaaggagaaacatgctcttgcaatgggtctctggaatcacgacaggaagagacccctcaaccactgtggacacttgagttggcaaggagagctgcttagagaagtggtaggggcagagctccaggtgatgtggagcccagtaggtttcgtgcgggagtgtttgtggtggagtacagccagcgatgtccatctccctaggctcaacttgcttccataggagactttagcaccaggggagctgtcggtcctaaattctgcagggcggtgttgcccatgagatagggccagtctgacttcagcaccctttggtctgctagcctttcccagggccccagcctgtccatgcctgcttgcagtgcagccaccaggtacctcctgggagcccacatcatagcacctgtgctggcagaccatgccagactgtcagagtgct

SEQ ID NO: 8525 - DNA, 479 bp, synthetic construct
  misc_feature 1..479: note = Description of artificial sequence: synthetic polynucleotide sequence
  source 1..479: mol_type = other DNA
gcagcagagtagcccccatggacacacaccagcccacccagctcatcccctaactacagcctcccccttgttgctttgcttgcacacacttgcccacagccacccttcatatcactttgccagtacctgcgtgtacaggcagacctcaccttcccttccccaccagcatacgtgtgagcgtgtgccctgccatgccactgctgctggtgtgagtatatcctgcccctcctttccctgcagcactgtccactgtgatggcaatggcattgtcatcagagtgttgttgggcatggagctgccagctccgccccagccagtccccagccctgcccctatgcgaacactgcctatggcacaaaactaggcacaaaaaccagcaggcccacccctgccctgagcggccaatgcctcccatgtgaatgtgcacagggggcacacacagccctgcatctagcagcatcctgctcccatgctaatcc

SEQ ID NO: 8526 - DNA, 121 bp, synthetic construct
  misc_feature 1..121: note = Description of artificial sequence: synthetic polynucleotide sequence
  source 1..121: mol_type = other DNA
caacactggcacaaacatgtgtacagttgctggtgagggccccccaacctgcctgagccatgctgccactgctgcttctatgaacacctgcacgaaggctggcactccggcatccactagc

SEQ ID NO: 8527 - DNA, 358 bp, synthetic construct
  misc_feature 1..358: note = Description of artificial sequence: synthetic polynucleotide sequence
  source 1..358: mol_type = other DNA
accttgctgcagccaacaagtgtgcaccccactgcaccgctgctgccactgcgactggcacatgcgactgaggatggatcatgtttccacagccctacaaagcactttggctggcaccatgcctcagagagttgtgatcagaggtccaggagcacctcaggcccctccaacatagcaggttcctaaccttaaggagccagagaacaagaccggggcctgataccagtgccccagagttataacacacagtttgggagtcctgagctgagacttgggcccctaaaatcttccagaaatgaagccagtctactgaacccaccttataccacaatcaaaccccgaaggtcattaaatatga

SEQ ID NO: 8528 - DNA, 121 bp, synthetic construct
  misc_feature 1..121: note = Description of artificial sequence: synthetic polynucleotide sequence
  source 1..121: mol_type = other DNA
tataaaaagggggaaaaaaaaacaaaaacagcaacatcaaagattgaaggaacatcattctacaaagatgagaaagaaccaagataagaactctaacaactaaaaagccagatggtcttct

SEQ ID NO: 8529 - DNA, 359 bp, synthetic construct
  misc_feature 1..359: note = Description of artificial sequence: synthetic polynucleotide sequence
  source 1..359: mol_type = other DNA
ttcctccaaacaatcacactagttctccaataatggttcttaaccaggctgagatagctgaaatgacagaagtagaattcagaatattgataagaacaaagatcatcgcaattcaggagaacactgaaacccaatttaaggaagctaagaatcacaataaaacaatacaggaggtgacagacaaaatagccagtatagaaaagaatgtaactaaactgatagagctgaaaaatatactacaagaatttcataatgcaattgcaagtattaatagcagaatagaacaagctgaggaaagaatctcagagcttgaagactgactttctgaattaagacagacaaggagacagtcagacaag

SEQ ID NO: 8530 - DNA, 360 bp, synthetic construct
  misc_feature 1..360: note = Description of artificial sequence: synthetic polynucleotide sequence
  source 1..360: mol_type = other DNA
aacagagaaaaaagaataaaaaggaacaaacaaaacctttaagaaaaatgagattatgtaaacagaccaaatctatgacttattggtgtccttgaaagagatggggagaatgggagcaacctggaaaacatattccagcatatcattcatgagaacttcccaacctagctagagaggccaacattcaaattcaggaaatgcagagaacccccacaagatacttcacaagactgtccccaagacacataattatcagattctccaagatggaaatgaaagaaaaaaatgctaaaggcagctacatagaaaggaaaggccatctacaaagggaagcccatcagactaatagtagacctctca

SEQ ID NO: 8531 - DNA, 241 bp, synthetic construct
  misc_feature 1..241: note = Description of artificial sequence: synthetic polynucleotide sequence
  source 1..241: mol_type = other DNA
gatatttttcagacaactcaacgctgaggtaatacattaccaccaggcctgcctaacaagagttcctgaaagaagcactaaatataataaggaaagacagttaccagcctctacaaaaatgcagttaagtatatagaccagtgacagtataaagaaaccacacaaacaatgcacagaatggcaagctggataaagaagcaagacccaatggcatactgtcttcaagggactcatatcacat

SEQ ID NO: 8532 - DNA, 481 bp, synthetic construct
  misc_feature 1..481: note = Description of artificial sequence: synthetic polynucleotide sequence
  source 1..481: mol_type = other DNA
tagagaccttcaaagagactcagactcccatacaacaatagggggagacttcaacaccccactgacaatattagacagatcatcaagtcagaaaattaaaaaagatattcaggacctgaacttaacactggaccaaatggacctcatagacgtctacagaactctccacccaaaaacaacagaatatacattcttctcactgcctgccacatggcacatactcccaaatcaacgacaccatcagacataaaacaatcatcagcaaatgcaaaagaccaaaatcataccaaccactctgtagaaccacagtgaaataaaaatagaaatcaagactaaaaaaaaaattgctcagaaccattcaattacatggaaattaaacaatctgctcctgcatgacatttgggtaaataatgaaataaaggcagaaatcattaagtttttttaaaccaatgaaaacaaagacacaacataccagaatctc

SEQ ID NO: 8533 - DNA, 479 bp, synthetic construct
  misc_feature 1..479: note = Description of artificial sequence: synthetic polynucleotide sequence
  source 1..479: mol_type = other DNA
agagcaaaccaaccccaaagctagcagaagacgagaaataaccaaaatcagagctgaaatgcaggagaatgagacatgaaaaaccattcacaagatcaatgaatccaggagctggttttctgaaaaaataaataagatagatagactgctagctagactaataaagaagaaaagagagaaaatccaaataaacacaatcagaaacaacaaagggaatattaccactcaccccgtagaaatacaaataaccatcggagactactatgaacacctctatgcacacaaactagaaaatctagaagaaatttataaatgcttggacacatacacccccaagactaaaccaggaagaaactgaatccctgcacagatgaataatgagctccattactgaatcagtaataaatagcctaccaacccccacccccaaaaaaatgcccaggacctgatggattcacagtcaaattctaccagatgta

SEQ ID NO: 8534 - DNA, 479 bp, synthetic construct
  misc_feature 1..479: note = Description of artificial sequence: synthetic polynucleotide sequence
  source 1..479: mol_type = other DNA
caaagaagagctgacaccattcctagataaattattccaaaaaaattgaggagaaggggctcctccccaggtcattctatgaggccagcataatcctgatactaaaacctggaagagacacaataacatcaacaaaaaacttcaggccaatatccttgatggacattgatgcaagaatccttaacaaaatactaacacactgaatgcagcagcacatcaaaaagcaaatccaccatgatctagtaggctttatacccaggaggcaaggttggttcaacatactcaaatcaataaatgtgattaattacatagacaggactaaagacaaaaaccacatgattatctcaatagatgtagaaaggttttttataaaattcaacatttctttatgttaaaaatgctcaacaaactaggtattgaaagaacatgcctcaaaataagagccaactatgacgaactcacagccaacatcatactga

SEQ ID NO: 8535 - DNA, 121 bp, synthetic construct
  misc_feature 1..121: note = Description of artificial sequence: synthetic polynucleotide sequence
  source 1..121: mol_type = other DNA
caacttcagcaaagtttcaggatacaaaataaatgtacaaaaatcactagcattcctatacaccagcaacagcgaagccgagagccaaatcaggaacacaattgcacttgcaatttccaca

SEQ ID NO: 8536 - DNA, 121 bp, synthetic construct
  misc_feature 1..121: note = Description of artificial sequence: synthetic polynucleotide sequence
  source 1..121: mol_type = other DNA
ccatgctcatggataggaagaatcaatatcattaaaacgaccaaagcggtttatagattcaatgctgtttccaccaaactaccagtgatattcttcactgaactagaaaaaaatattttaa

SEQ ID NO: 8537 - DNA, 240 bp, synthetic construct
  misc_feature 1..240: note = Description of artificial sequence: synthetic polynucleotide sequence
  source 1..240: mol_type = other DNA
ggagaaaggacttcctactcaataaatggggctgggataactggctagccatatacagaagatggaaactagactccttccttacaccagatacagaaatcaacttaagatggattaacaacttaaatgtaaaacctaaaactataaaaaaccctggaagacaatataggcaataccattctggacatagaagtgagtgaagatttcatgacaaagacaccaaaagcaattgcaacaaaa

SEQ ID NO: 8538 - DNA, 121 bp, synthetic construct
  misc_feature 1..121: note = Description of artificial sequence: synthetic polynucleotide sequence
  source 1..121: mol_type = other DNA
tacacatggccaacaagcatataaaaaagctcaatattacttatcattaaagaaatgcaaatccaaatcacaatgagagatcctctcacaccagtcagaatggctattattaaaaagttaa

SEQ ID NO: 8539 - DNA, 479 bp, synthetic construct
  misc_feature 1..479: note = Description of artificial sequence: synthetic polynucleotide sequence
  source 1..479: mol_type = other DNA
catatacaccaaggaatactatagagccgtaaaaaagagcatgtcctttgcgggaacatggatggagctggaagtcattatgcttagcaaattaatgcaggaacagaaaaccaaataccacatgtgttcacatataagtgggagctaagtgataagaacacatggacacaaagaggggaacaacacaaactggagcctagctgagggtggaggccccagggaggagggagatgagcaaaaaaaaaaaaaaaaaaaaaaaaaaaaaaaaaaaaaatgactgggttctaggcttagtatctaggggacaaaataatctgtatgacaaacctccatgacacgagtttacctatgtaaaataaaagtttaacaaaaaactaaaaaagttacctatgtaaaacaaaagtttaacaaaaaactaaaaaaagttacctccacccagaaatgcctttattaacactttggtttgtaaccctccatta

SEQ ID NO: 8540 - DNA, 478 bp, synthetic construct
  misc_feature 1..478: note = Description of artificial sequence: synthetic polynucleotide sequence
  source 1..478: mol_type = other DNA
ttttctctagacatatagatttatgaggcaggctaatgtgctgagacactagcttgagtttcatttggccttgctgtgaatatacctgggccttcctttgcttcaggatgccctaaactgtggcaaagcagagctgaactgcccaaaggaaagtgtgaagaggagaggcaggccaagcctggagaaaggctacccaagagagaggaaaggaaactgtggtgagtgcacctcactcctaaagaaggacaggaactctggtaggtgaggtgtgttttccatagatactaaaactcaaagccacacaggggacatatgtccattcctcagccagtcactgtggccaggaacagagggtcaggtaagagaatggcaactcctaaggaaaccacatgcctggagccgtgggtgtagaagcagatccccagaggaagcacgggtcccacagacacagtcccaactcttgccgtctaggcagcca

SEQ ID NO: 8541 - DNA, 240 bp, synthetic construct
  misc_feature 1..240: note = Description of artificial sequence: synthetic polynucleotide sequence
  source 1..240: mol_type = other DNA
ctcccatctgtaggtactacacagcttcgtagtacttcttaaagtacttcttgttcaagcgatgggacgaaaagaggatgcaggacaaggaggaggaaaggagatccttgcttttgtagaagaaacaaggaggcagggaaggcttagaggacaggcaaggagagatgttttcttaaaaacatcctctgtctgagtgttcagccccacatctctgctggtcctacccctataagcacaagg

SEQ ID NO: 8542 - DNA, 240 bp, synthetic construct
  misc_feature 1..240: note = Description of artificial sequence: synthetic polynucleotide sequence
  source 1..240: mol_type = other DNA
aaaagggcgggaggcagcaggagaaggattgatcattcaggcctatattcaagtttgccttttcttgccatgtggttttaatctcaccaatcacaagcctgaaggtatagtggggccactgaggtccgagttcaaattcagccatgcaactaaggaaacattgtttgatcttggtcctgttttctcatgtgtaaaatgggtctaactctaaaccacacattgcactgagaatgaaatgag

SEQ ID NO: 8543 - DNA, 240 bp, synthetic construct
  misc_feature 1..240: note = Description of artificial sequence: synthetic polynucleotide sequence
  source 1..240: mol_type = other DNA
gcactatgaaatgaagtgaggttagttgaataatgttccccccaaattcatgtctactgaggacctcagaatgtgactatatttggaagtagggtctacgcagatgtagtctaaatgaggtcatactgcattagggtgggcactaatcaaacggatggtatcctcataagaggagaggaatgtagagatacacacagaaaagaatgtcatttgaagatggaggcagagattggagtgata

SEQ ID NO: 8544 - DNA, 240 bp, synthetic construct
  misc_feature 1..240: note = Description of artificial sequence: synthetic polynucleotide sequence
  source 1..240: mol_type = other DNA
caactataagtcagggaatgccaaggacttgaggtcatgtgttacagaagccctaggaaatgagtcaatttcctggcacagcactaagacatgctggtattcttcattccatccctttcccctattcctaaatgtgctccagggacaatggggaagctggagcacatataagaataggggaaagagagggaataaaagggtattaaaaactctcaaggtatgttaaaaaaaagactctca

SEQ ID NO: 8545 - DNA, 239 bp, synthetic construct
  misc_feature 1..239: note = Description of artificial sequence: synthetic polynucleotide sequence
  source 1..239: mol_type = other DNA
cccatgtttgcagatgacataattttatatctagaaaatcccacagtctcagcccaaaagctccttaagctgataaacttcagaaagtttcaggatcccacatgaacatacaaaaatcactagtattcctaaacaccaaccatagctaagccaagagccaaatcaggaatgcaatcccattcacagacaaactgctaaaagcaaaaccaaaactttccaaataagccaggctttcgtca

SEQ ID NO: 8546 - DNA, 240 bp, synthetic construct
  misc_feature 1..240: note = Description of artificial sequence: synthetic polynucleotide sequence
  source 1..240: mol_type = other DNA
gttcctcagaactagttctggtttgactcactctcatgttacggcaaaccttaagctgaatgaacaacttttcttctcttgaatatatcttaacgccaaattttgagtgcttttttgttacccatcctcatatgtcccagctagaaagaatcctgggttggagctactgcatgttgattgttttgtttttccttttggctgttcattttggtggctactataaggaaatctaacacaaac

SEQ ID NO: 8547 - DNA, 240 bp, synthetic construct
  misc_feature 1..240: note = Description of artificial sequence: synthetic polynucleotide sequence
  source 1..240: mol_type = other DNA
agcaactgttttttgttgtttacttttgcatctttacttgtggagctgtggcaagtcctcatgtgagtaacgagtgggttgagatactctcatactattatgttgtggaccatgatgaggctgccagggtgggggaagggtggcctaccttctctccacaccatttgaggcaagagacattctgcctcagaaattgtgctgaggggcacaaataagctaatgtcctcctgccccagattt

SEQ ID NO: 8548 - DNA, 480 bp, synthetic construct
  misc_feature 1..480: note = Description of artificial sequence: synthetic polynucleotide sequence
  source 1..480: mol_type = other DNA
ctctcacttgttcctatgcatattgttcttgttgctcagttttataaggtgagatattttctgcaccaaatatgtgcactgtaaaataatataactattcttaagattgtctctcagcttagagttttcggaggcttaatggtgaagaacttaaaaatctgttttcctatgactgacatctgtttgtgattatccatttagcagacggtgatccctccaggctggcctttgtttacaagctatgcctaagaggcagctgttggtggagggggaacaaaaacaaaaaacccaaaactattatcttaataacttatagaggtaatcattattgaacaaaagcatgatttggggactatggaaaggcttattctttccatataaaatgatcagcgaaaaggtagaaaaattaaacagaactgaaataattgctattgattgctcaccgcctggatgcactgagtagaagagcaaaggcaatgg

SEQ ID NO: 8549 - DNA, 480 bp, synthetic construct
  misc_feature 1..480: note = Description of artificial sequence: synthetic polynucleotide sequence
  source 1..480: mol_type = other DNA
gttcatgtggaggggatggaggtggagaggctaagcctgagtgagattaccaactaatcaggacttttaacccaaaaatactatggctctgaggggcagggaatgagagacctaaattgacaaaatgcagagtaaaaatattcagtgtgagcagtaatgagacagttgtatcagggtcaaatacggagttggcctggatgtcctccaagctcctttccaagcctaagattctgtgagtggatgaacaatcctggtcctgctgctcttgccactggaacctgatctatttgccttcattatttgaggtctccccatcatcaggctctttgttgtctgctgcttcagggtgtcttctccccagatttctcctgttggtgagcttttccattgaactggagctcctcacaggcaagaagcacacctttaaggttctctgagtcccaagttcctagtgcagtacctggcaatacacataggtgc

SEQ ID NO: 8550 - DNA, 479 bp, synthetic construct
  misc_feature 1..479: note = Description of artificial sequence: synthetic polynucleotide sequence
  source 1..479: mol_type = other DNA
ttagtgggtgcttgccgaattgttgaatggatttatttgatgaaatgtcaggagaatcaccagaaatgaaatgttcgtgtaatggacagggggaagtttgaggttgatttgaaaaaggagatggtagagacagtattatgggtcatgcttcagagtttatttgctttacaatacattggacagcaaccagtagattgttgtgtgtcattttaattccacatgctaatgtccaaatatgtcatatgtcttaattgttgcatacgtgggttactctgtaaaggggcaactgtagtatcacctcctcatgccacaccctgctccactgtagctgggctcgataaccttcaaatcaactcacagaattccaggacagacaagagcatctgaaaggttatctagccccagtcacctctgatgccttccagctgtctctaacacacctgtgggctgacttccagttcttagtcttcacggctccc

SEQ ID NO: 8551 - DNA, 240 bp, synthetic construct
  misc_feature 1..240: note = Description of artificial sequence: synthetic polynucleotide sequence
  source 1..240: mol_type = other DNA
tatgatgaactgcccctgctttgagggattttcctccattgcctcagaagtactgccctgggggagcttctgatgctcttctgaccaccttgtctctgcctttttcactagtcctctgttcctgctctccaaattttgggacgttcctgagttcagatcttttctttataatctttcttttatattctccccatcagatggttcattcattcctcaatattaactaacatttccatatta

SEQ ID NO: 8552 - DNA, 239 bp, synthetic construct
  misc_feature 1..239: note = Description of artificial sequence: synthetic polynucleotide sequence
  source 1..239: mol_type = other DNA
gaaataacttccttatctttagccctaaattttgtcccaaactctggacctacaattttttggaatgcttatgccttgcccagactaaaaccaaacttactgtcttccctctaaaatcagctccccatcttctatttctccctgccacccttcctcccccatggctccaatattgtcttgccagtctggtcttaaaaccacagtcaatcttgttgcttttctctttgtctcttgtgcat

SEQ ID NO: 8553 - DNA, 480 bp, synthetic construct
  misc_feature 1..480: note = Description of artificial sequence: synthetic polynucleotide sequence
  source 1..480: mol_type = other DNA
ggctgatcagcagtcaattgttttgtcaattgtcttatatgtttcttcttcctcttccttgcttcctttttctgacctgaagttagggccttgttaccaaacatctagatgaatacagtgaccccctaattgagaggctgtctaccaattccacccaccctcaattctatactcaaaaaaaaaattagatgtaatctttttcagatactcctttggtattgtcacttagtttttgagtgactgccactatttcccgattggcagctctgcctggcattaagctcttgacattctcaacctaagtgtccagccaagttactctgttcattgtcccctcaacacgcctgtgcatttgcacctctgagactgcttctgagtcagctatgcactgccctttagaatagcttcaaccccaaatcctaccagtgcttcaaaggcccagttcaaatcctacccctctgggaagtctcccttccttta

SEQ ID NO: 8554 - DNA, 240 bp, synthetic construct
  misc_feature 1..240: note = Description of artificial sequence: synthetic polynucleotide sequence
  source 1..240: mol_type = other DNA
gtcaacttctagggcttttgcaattttatcacttgttttacatcagttttactatttttcatgtgtgagagttttaaccttccaattatggtacaatgtctttaagggcaagggccctttcttagaggaaaccctctatgaattctccaatgataaattattctatgaattctcacaactttctaatataaaggcttataaaaagtgggaactcactgtttattgcttaaaaaattgaga

SEQ ID NO: 8555 - DNA, 239 bp, synthetic construct
  misc_feature 1..239: note = Description of artificial sequence: synthetic polynucleotide sequence
  source 1..239: mol_type = other DNA
tttaatttgaacttaaatgctctattaaattgagtagaatagcatcttaaggctactggtagtctatctatgccacagatggtttagagatcaaataattactcatatacctatgacagcagagtactggctgtaagatccccccaaaactcaaatacctattgggtttgtcaggcaacaaaaataagtgaatccagctaggtctaatacaatggaaaatggtaggacctggggcaaac

SEQ ID NO: 8556 - DNA, 240 bp, synthetic construct
  misc_feature 1..240: note = Description of artificial sequence: synthetic polynucleotide sequence
  source 1..240: mol_type = other DNA
tctgcataacttgcccaaaggcattcaaattcagattatgttcagacattgctaattacaattagtgtcttagacacttggcttcaaaacagtggttagttcaggtatttcagatcaattgggtatgcatttatctaggtcttcatggatagccgggctctactagacactgggagagggaagaggcaaatgggataagactggcagtatttaacaaagaatgaagtattttacaaacat

SEQ ID NO: 8557 - DNA, 239 bp, synthetic construct
  misc_feature 1..239: note = Description of artificial sequence: synthetic polynucleotide sequence
  source 1..239: mol_type = other DNA
gatcctttaggctggttattgttacacaaaggaatgatttgctaggattcttgagatacttccatagaatgtctatgcctcacttattgcacagaccagagaattccataaaagcactggctgtgtcttatttacccttgtatactagagcttggcacatagtaaataccaagtaaatgttttgaataaaagaaagagataattaaagcttcagcaccacaattatttgtatttcatct

SEQ ID NO: 8558 - DNA, 481 bp, synthetic construct
  misc_feature 1..481: note = Description of artificial sequence: synthetic polynucleotide sequence
  source 1..481: mol_type = other DNA
atcagtttggaaatagatctccacagacagtagaaatggcaagaaactaggcctatagcaaccaagaagtgaaactgctagaacctaccatcatttctgatcctcttgcaaattttgcttgaaaaaaatttcctcattttctgtttacgaacttatcctcagaatttacagatgtttccttgatttctctggaaagatacaacttcctaatgcaattgagtaaattgatacttcttatgtagaaataagcagaataagctgggcaaggtagcccacaactatagtcccagctacttgggaggctggggcaggaggatcacttgaagccagagtttgcttgaggccaggaattcgaggctgcagtgctctatgatcacacctgtgaatagccactacactccaggctaggcaatgagtgagacctagtctctaaagaaaaaaaaaaaaaaaaaaaaaagacaaaataagatcaaaattgagt

SEQ ID NO: 8559 - DNA, 479 bp, synthetic construct
  misc_feature 1..479: note = Description of artificial sequence: synthetic polynucleotide sequence
  source 1..479: mol_type = other DNA
atgaactgataaatacaaggtagacaagaaatatcctgagaggcgcaatcgttctgcagacatttgcttgggaagctcaggggaggatttatgaaggaggtagccctgagtgagtcttaaaaaatgggtagacttttaccaggcaagatcttagtgaagttagtgagaggagtggtcatataggaattcatgggatttttagaccaaagattaccaccctcataagtgataatgacgatgaatgtgaagaatgtttaccacttgcaaagtatttttcacataccttgtccaagttcccacaagcatttctgttcactacctgtggtttggtcaagagacccagatattagagaacgtgttgatttctagtttctaactccgcccaataacattaagatgaaaatggatagccacataggaacagacatcaataaacatatttagaaaacacaagtgaattttaaaaggggagacttaag

SEQ ID NO: 8560 - DNA, 360 bp, synthetic construct
  misc_feature 1..360: note = Description of artificial sequence: synthetic polynucleotide sequence
  source 1..360: mol_type = other DNA
aggtggcatggttgtttgaacatgttcgtttttgtctcctggagaaaagtcagcacaatgctcattcagctacataagtgtttctgttacagctctttcagtccaccattcggcaggtcctgaattcttgtcccttgtccagaaaaaatgaggtatgtggacaactggagggtgagcaaggcggagaggagcttcgttgagtgacagaacagctttcaggagacccaaagtgggtagcacttttccataggcaggaaatgagtgttcaactctcagcagagaggagacccacaatggatagctccttaccacaggcaggtcatcccagagaggtgaggagacacaagccaggcacagtgg

SEQ ID NO: 8561 - DNA, 121 bp, synthetic construct
  misc_feature 1..121: note = Description of artificial sequence: synthetic polynucleotide sequence
  source 1..121: mol_type = other DNA
ctgggtgagagagcaagactccatctcaaaaaaaaaaaaaaaaaaaaaaaaaaagaaaagaaagaaagaaagaggagatctgaagtgagcaactgcttcccctagctggtagtcccaatgt

SEQ ID NO: 8562 - DNA, 239 bp, synthetic construct
  misc_feature 1..239: note = Description of artificial sequence: synthetic polynucleotide sequence
  source 1..239: mol_type = other DNA
ttggccaggctggtctcaaactcctgacctcgtgattttcctgcctcggcctcccaagtgctgggattacaggcatgagccactgagcccggtcgagtccagggtttttacaggctcagaagggaggaagagtgtgctgattggcccatgggcagccatggaagggcccagaaaaagcactgtaagttcttaccccaggctgtggactccacccacaattggcaacctggctcccaggc

SEQ ID NO: 8563 - DNA, 240 bp, synthetic construct
  misc_feature 1..240: note = Description of artificial sequence: synthetic polynucleotide sequence
  source 1..240: mol_type = other DNA
tttgggccatccctggcttgaaggttgggtttcaccagggacctaacccctttccgccaaggaacctgtctccctcttgccatcaacatgctgtccatgatgcccaggctgttcgtgccgaggggtgcctgcaggcctgccctgagccaccctcagcccctgctcagcctccctctgtgcttgtcagcacccaacatctggaagaggtcgaggcagcagggggctagtgtgtcagtacca

SEQ ID NO: 8564 - DNA, 241 bp, synthetic construct
  misc_feature 1..241: note = Description of artificial sequence: synthetic polynucleotide sequence
  source 1..241: mol_type = other DNA
tcctgagcacccacatgcctggccgggttgtgacagcacctaggcttggccacaactttgcttcacccagtagcaggtgccaggagtgggaagaggccagggagtgggagcaggcactttcaaccttgtgggagcaggggacttcctgggcccctgagagtacagagatgcctgggtccagagccactgctgggcagctacaggggtgcctgggagcatgcggttcccaccccgccaactc

SEQ ID NO: 8565 - DNA, 481 bp, synthetic construct
  misc_feature 1..481: note = Description of artificial sequence: synthetic polynucleotide sequence
  source 1..481: mol_type = other DNA
agtacggggcgggactcccacctgttcttggcctccctggccacacctccactgctgcagctgctctaaacgggcagctgctgccatcactgtgagctatgattgtgccactgactccagcctgggcaacagaaagagacctatatggtatgttaaatggtaatgactgctttgggggagaaaagatgactaaggattgttgggaatgctggggtagggttggagtgctcttgcaattttacataagacagtctcaggagaaaaaacaatgaaagtgtccgggtagagggacatgtacactggcagcaaggtcttcccttagggattggatctgcggaagaggccacacaggcctggaagcaggcttaaggccattcaggctaggaattccagtgtttcaaagacagactgcaatggatggcggttggtaggtcaaaagctccagataacatctctcagccctgcgaacaccttactctcg

SEQ ID NO: 8566 - DNA, 480 bp, synthetic construct
  misc_feature 1..480: note = Description of artificial sequence: synthetic polynucleotide sequence
  source 1..480: mol_type = other DNA
gggagaaggatgggcacagtgggtcctttaaagcatggggtccaggacaggggcctcttgtcttggctgttgaaaaaactgggttttacactgagtgaaatgctgagccatcggaaggttttaagaaaatatggtttgacttttattttttaaaaaccactctggctgcagaatcaactgcaggaaggcaaaactggaatcatagcatccagttgtcagactaatgcagaaatcaccatgagaaatgacaatgactctgaccgatatggaagcagtggaggtggtgagaaatggtcagattctggatatatttgaaggaagggccaatagggttggttaatgaatcagatgtagagtgagaaaagaaaggactcaagatgactccaaggttcttgtccttcacctcaataagtggaggatggagcagaggaaggcaagactagaaggtaaaaatagcagtgagaaggctctgctatggta

SEQ ID NO: 8567 - DNA, 240 bp, synthetic construct
  misc_feature 1..240: note = Description of artificial sequence: synthetic polynucleotide sequence
  source 1..240: mol_type = other DNA
taagaagaaatgataagaagctgaattaaggtgatggcagtggggtggaagaaaggagagccaccatgcaaaaagtatccaggagggagaattaacaggactaggggatgggccatatttgcaagatgagaaatgcagaggtctaagattctagcttaaggtgggtgttgctactattagcataataggaaaacaaggcacaaagacttttcaaaatttgtccaaggtgttagaggctta

SEQ ID NO: 8568 - DNA, 240 bp, synthetic construct
  misc_feature 1..240: note = Description of artificial sequence: synthetic polynucleotide sequence
  source 1..240: mol_type = other DNA
caatttgtaaaaccaggattaaacccagatgtgtctgattttagagcctgagctcttactcattgcataaaccatattttccccagaggaggattagtaggaaaggaagctgctggttggaaagtatctttatagcagtgtctgttcctcggtttgctcaaggggacagtgtgccaggaaagtccccgtggaagggcaaggaagaaggggaagttaaagccagtggcaggtgatccaaga

SEQ ID NO: 8569 - DNA, 240 bp, synthetic construct
  misc_feature 1..240: note = Description of artificial sequence: synthetic polynucleotide sequence
  source 1..240: mol_type = other DNA
atcttttctgttgctagagctatgttacatgctgtcctttcatgctctaaaaataagagtgctggcaagtgccaggcctgttggtgcagcttaagatgatacctttcttggatatatatgcatctgaataaggaaggctatcttctggtcaagctaaggtatgccatgagcatttccctgtggaaagcacttaattctgttcccagttgttacctgctgtaagatctccctttctaaaat

SEQ ID NO: 8570 - DNA, 239 bp, synthetic construct
  misc_feature 1..239: note = Description of artificial sequence: synthetic polynucleotide sequence
  source 1..239: mol_type = other DNA
aaaaacaagaatacagctcactgaggaccttacatttccctctagctactgactcatttctcttctcctttttatagcactcttcttgagagagttgcctatatttgttgccacatctttacccattctcttttgaacctattcaagctttcatctgtacaaaactcactgatactgtgcttgtcaggatcatccatgacctccatactgctaaatgcaactctcaagagtatttggct

SEQ ID NO: 8571 - DNA, 479 bp, synthetic construct
  misc_feature 1..479: note = Description of artificial sequence: synthetic polynucleotide sequence
  source 1..479: mol_type = other DNA
ctactgatcactcctttgtagcactgtgttttaaaatataggttttattattatttaggtatggtgaggccaatatatcaggaaatgactgtcgttgaaaaaagtatgttgtactcacagatcccaagagaaggggggcacaccatgccacaaagggccacatggggaagcaccagggtcagccaggaggtgggtggggggtgcgcaagatctttattgtggtttcaacaggaagaaatgggtgaagcagggtgagtggatttaggattagctgatataaataatttcagcaggctctggggcataggggctgtccctagtcttctggtacttggccctggggtgattaaggcagttgcatagtgttgggaatgtgaaagcccccaataaatgaggcagttgtgggtatgggctctgaaatgggttggtttgcatttgaaaggtgtgctcatgggcaagtggtttactctctcttagag

SEQ ID NO: 8572 - DNA, 479 bp, synthetic construct
  misc_feature 1..479: note = Description of artificial sequence: synthetic polynucleotide sequence
  source 1..479: mol_type = other DNA
gttagaattggctaaccctgggagcggcagtcccttcagggtcagcaaggccccaggtgtcaaagcatcagaatacagaaaataaaatgcatggataatacacactgccatttgcctttgtacccttcctttcaatcttctctgctggtgaccgctcttcacaaagatctataaatgttggaataccccatgtctcagtccttgggcactctctttcctatctctctgtaggtgatgtaatgcagatatccatgactttaaatctttaacacttctgcattgatgactcctaaatttacatctctaccccaactgcctactaaacacctccacttggctatctaataggcatttcaaaccaaatctacaacaaacgtaactctttttccccttccttaatttgcttctcccccagccttctccattttaataaacagcatctccattgccttagtgactcaagccccaaacttaggaat

SEQ ID NO: 8573 - DNA, 480 bp, synthetic construct
  misc_feature 1..480: note = Description of artificial sequence: synthetic polynucleotide sequence
  source 1..480: mol_type = other DNA
tttcccagatttccctctttttctcaaactatatatctagcctgtcagcagttcccttcaggtcttttttcaaactatagaaggcctaaacaaaggaaagacatgctgtattcatgaattggaagactaaatattattcagctggctgtattccccaaattgatctatggattcaatgcaatccctaccaaaattccagcttcctttgtctgcagaaatgagcaagttgaccctaaaattcatttgaaaatgtaaggaagcccgaatagccccctaaaaaaaaatcttgaaaaagactaacaaagttggaggactcacactttccagtttcaaaacttactacaaagctacagtaatcaacgctgtgtggtactgacataggatagacatatagttcaataaaacagaatcgagagtccagaaatacatccttatatatatgatcaattgatgttttgcaagggtgccaagacagttcaa

SEQ ID NO: 8574 - DNA, 480 bp, synthetic construct
  misc_feature 1..480: note = Description of artificial sequence: synthetic polynucleotide sequence
  source 1..480: mol_type = other DNA
tagggaaagaataatttcctcaacaaattgtacaggcacaactgaatgcccacaatcagtagaacaaatttggaactaaagttcttatatttaggttcttgatccattttgtttaatttttgtatatggtatgaggtaaggctccaaatttgttcttttgcatgtggacatccagttgtccctgtacaattgctccatttatatttatcttagcagaaaatacagatgtaaatctttgtgaccttgactaggcaatggtttcttaggtattacacctaaagcacaaacaataaaagaaaaaagtagataaattggatttttttacttaaaatcaatttgtgtttcaaaattaaataaaatcaaaattaaattaaaacatttatccttcacaggattctataaagaaactgaaaagacaatgtgcagaatgggaaaaaatatttccaaatcatatatttgataaatagtttggcaattcct

SEQ ID NO: 8575 - DNA, 479 bp, synthetic construct
  misc_feature 1..479: note = Description of artificial sequence: synthetic polynucleotide sequence
  source 1..479: mol_type = other DNA
caaaaagttaaatatagagttaccatttaattcagcaattctactcctacatatgtacccaagataattaaaagtatacatagacaaagacttgtatatgagttttcataggaactttattcataatagccaacaagcagaaacaatccaaatgaccatcaactgatgaatgggtaagcaaaatgtggtatatcatacaatggaatattatttagtcacaaaaaggaacgcagtgctgatatatgctacaatacagatgaaccttgacaacattatgttcggtgaaaaaagccagccacaaaagtccacatattgcttgattccatttttatgaaatatccagaataagcaattgatagagacagaaactagattagtggttgccaagggccatagggaaagggaaggggaaataggaagtttctgctaatgggtaaggggttccttttcagggtaatgaaaatgttctaaaattggat

SEQ ID NO: 8576 - DNA, 240 bp, synthetic construct
  misc_feature 1..240: note = Description of artificial sequence: synthetic polynucleotide sequence
  source 1..240: mol_type = other DNA
aatagtgtttgttgcacaactccgtgaacatactaaaaaccacagagtcgtgcacttaaaaaaagtttgtgttttaaatatatatacacacttagacacatataaccctctttcgtatatcaattatactttaataaagctgttgaaatttttaaaataaaattttaaaacaaagaaaaaatatataaactcgccaacagaccacttctcacccctactagcccctctactctaagctat

SEQ ID NO: 8577 - DNA, 240 bp, synthetic construct
  misc_feature 1..240: note = Description of artificial sequence: synthetic polynucleotide sequence
  source 1..240: mol_type = other DNA
cagcatttctgcaaacacattcctaaccgatctcactgcttgtaatcttgccagcaacctctccctctcagcaatagtctattgcctacaccaaagcttagttgtctcttaatgatgtaaatgaggttctatcattctcctgacccaaaccctccactgcttttcatcacactcagagcagctctgctgttgcctgatttagatgtatggctccaacagatttcccctgaagaaatgatt

SEQ ID NO: 8578 - DNA, 240 bp, synthetic construct
  misc_feature 1..240: note = Description of artificial sequence: synthetic polynucleotide sequence
  source 1..240: mol_type = other DNA
ccatggctgataaaagttggaaagcctcctcagtttcagaccattatcagattagctgtgtgctctgtccctttcctcaaccataagaagtccatggataaagaaagcttcagagtaaaggagaaagcatgggaggtacagcaggaccaaggtggggcattcgcagcccccaccctcatcagagccagttccctactctccctgtctaaacctcttagtaagaggtagttcaagagaggg

SEQ ID NO: 8579 - DNA, 240 bp, synthetic construct
  misc_feature 1..240: note = Description of artificial sequence: synthetic polynucleotide sequence
  source 1..240: mol_type = other DNA
gcaaactcaattccagcactcaaaagcacttgactactttgctcagtcaactagcaagtatttattgagaatgtagctctgttctatggagtcttattttcaagtgtcagactcccagacatccagtccaggtaaagaagatggtgtccattattcatttgacaaacaaagttggggttcaagggccagctattgaaaaaagctatggaaagcttcatgagacgtgcaggtaactgccaa

SEQ ID NO: 8580 - DNA, 361 bp, synthetic construct
  misc_feature 1..361: note = Description of artificial sequence: synthetic polynucleotide sequence
  source 1..361: mol_type = other DNA
tatgtgtggttcacaaggactggttcatattcagaaacggccattagaaaaggaagaagaacttctcatttggatttataaagagtgtcttgtttactcttaatttatatcttctcttctccaggaaatcaacctataacttctcctcccagctccactctaccatggtctgtcaccttccccaaatgatttgttattcccctgttttcaaaagtgaacaaagaaccaaagacccagcaaagtttcacaaggccctgagactttcaattgtctatttcagatcaaatacagaacatgatcttcctcctgctaatgttgagcctggaattgcagcttcaccagatagcaggtaagaaaggac

SEQ ID NO: 8581 - DNA, 307 bp, synthetic construct
  misc_feature 1..307: note = Description of artificial sequence: synthetic polynucleotide sequence
  source 1..307: mol_type = other DNA
gctttattcacagtgacagtccctaaggaactgtacataatagagcatggcagcaatgtgaccctggaatgcaactttgacactggaagtcatgtgaaccttggagcaataacagccagtttgcaaaaggtggaaaatgatacatccccacaccgtgaaagagccactttgctggaggagcagctgcccctagggaaggcctcgttccacatacctcaagtccaagtgagggacgaaggacagtaccaatgcataatcatctatggggtcgcctgggactacaagtacctgactctgaaagtcaaag

SEQ ID NO: 8582 - DNA, 271 bp, synthetic construct
  misc_feature 1..271: note = Description of artificial sequence: synthetic polynucleotide sequence
  source 1..271: mol_type = other DNA
gcttcctacaggaaaataaacactcacatcctaaaggttccagaaacagatgaggtagagctcacctgccaggctacaggttatcctctggcagaagtatcctggccaaacgtcagcgttcctgccaacaccagccactccaggacccctgaaggcctctaccaggtcaccagtgttctgcgcctaaagccaccccctggcagaaacttcagctgtgtgttctggaatactcacgtgagggaacttactttggccagcattgaccttcaaa

SEQ ID NO: 8583 - DNA, 136 bp, synthetic construct
  misc_feature 1..136: note = Description of artificial sequence: synthetic polynucleotide sequence
  source 1..136: mol_type = other DNA
ggtcagatggaacccaggacccatccaacttggctgcttcacattttcatccccttctgcatcattgctttcattttcatagccacagtgatagccctaagaaaacaactctgtcaaaagctgtattcttcaaaag

SEQ ID NO: 8584 - DNA, 241 bp, synthetic construct
  misc_feature 1..241: note = Description of artificial sequence: synthetic polynucleotide sequence
  source 1..241: mol_type = other DNA
ttttccttttcagacacaacaaaaagacctgtcaccacaacaaagagggaagtgaacagtgctgtgagtaagcatgatttttacttttctttcttactttcttttctctctcagcttgaattttaaagtaaccactgttctattaattcatggaaggcaactgaatagttccagcttatagaatcttcctgtttggtagcatttcagcgaagcctcgttcttagccccagaacaatcatgc

SEQ ID NO: 8585 - DNA, 479 bp, synthetic construct
  misc_feature 1..479: note = Description of artificial sequence: synthetic polynucleotide sequence
  source 1..479: mol_type = other DNA
catcttttgctcggtctatattcctaagcactcctagatgatactgcactggacctctggtctcacatagttagaaacagagttaaaatcgaacagcaaagagaagatattcaactgcgatgcaattgacaatggatgtttttgcaacaaacaatgattaagaagtacattgttgtgggctctgagtcaagagtaatatgggaaaaacacaagtctcttcatgaggttgacaggtttggagctggaatctgtggaggaggaaggatatgatctaggggtcagaagaagtgggttactaaaatcattaagcctggttggatgaaaagcttagactcaggggaagcagcacatgattgtgggggctggcaagtttgaaatgtgtagggcaggccagcagtctggaaacccaggcaggatttctaccttacagtcttgaggcagaattccatcttttctgggaaacctcagttttttgctct

SEQ ID NO: 8586 - DNA, 478 bp, synthetic construct
  misc_feature 1..478: note = Description of artificial sequence: synthetic polynucleotide sequence
  source 1..478: mol_type = other DNA
taaggccctcaactgattgaatgaagccaacctacatcatgggagataatcagctttacttcaagttaactgatagcaaatgataattacatctacaaaatactttcacagcaacatatagactagcatttgactaagcaactgagcaccatagccaagatgacacataaaattaatcatcacaggcaccaagagatgaggggggcagtcttggccatatatttggctgaagtaagtcaatttgtcattcctgcatgagcctttataaacagaagtaagtaaccaactactatttggtcattggagttgtccaagaggccagggttctgtctaatacctgttcatgcatgaacatgccaacctagattgcatgcagactaccagttttgggtttttgtttagttcagcaggatttttctcagctcactgcctctcaaactttcagcaacaaaaggacatctgtgatatcagaatctac

SEQ ID NO: 8587 - DNA, 478 bp, synthetic construct
  misc_feature 1..478: note = Description of artificial sequence: synthetic polynucleotide sequence
  source 1..478: mol_type = other DNA
cactctaagtatttggatgcaatagcaatgaatatctgagtaaatctaggtggggagtgggggcaccctgtagccaaaatgatttaacaaaatcaaaccaaaattttggaaatgatgccttggtacaatgaagagactacttgaggtaggtttgacttatctaatatcttattttctttaccaatacctaatgaggaatttaaatatttctagatagctttggaaaggtcccttaaagaggcaccagcataccactgccagatctaatccccccaaacactgttttcatcatcatcatgtcatctcttgtctctatagatcatatcaaatccttcccagagtttttcaggccttttgacaactagccacatttcactaagccaactcatctaccactcttcaacaaaacttttcctcaagttgagctgctccaccaacaccactgccatgagctcattcccacttctgtggctttgct

SEQ ID NO: 8588 - DNA, 361 bp, synthetic construct
  misc_feature 1..361: note = Description of artificial sequence: synthetic polynucleotide sequence
  source 1..361: mol_type = other DNA
catgttggttatttttttggagtgtcctccctattccttcttacttgtcccaatcccaacttttggcatggtctactttaagatacagtaatgagtaactttattattataacaccaggcttctgttctaagacattagaagtgtgtttagactagctcatttaatcctcacagtagccctctgaagtacttactccctgcttcccattttataggtgaggaagaaaaacatgaagaggttaactaacttgcccaaggtatatagctaataatataagggccaataaattgattcagcaatccaggtgtccaagtccagaatccacacccatacactacactctgcttttttaaaatttaa

SEQ ID NO: 8589 - DNA, 358 bp, synthetic construct
  misc_feature 1..358: note = Description of artificial sequence: synthetic polynucleotide sequence
  source 1..358: mol_type = other DNA
atcctcctgccttggcctcccaaagtgctgggattccaggcgtaagccactgtgcccagcctacatacacaacactctcttgcttaatctgtaagactctctcccccactcatacctttttatttttcctctgcattgtacacacaatctataccactcttaagcacatgattacagcgttattttctggctgcttctatgtgtctatattttaggtccacctggtcaatataataaagtgggatattagtgttaatgcaactatatggtatttgatatttgtctttctgtccgtttatcaatgtttcttatagtttattatataataaatttaaaaggtgtctgattttgaccaaat

SEQ ID NO: 8590 - DNA, 480 bp, synthetic construct
  misc_feature 1..480: note = Description of artificial sequence: synthetic polynucleotide sequence
  source 1..480: mol_type = other DNA
ttgactaaatactaaaaaacaatattaaaataaattttgtttaattttagttgagtctatcaactcaaaaaagaataacgtacaacaataacaagtttcagaacattttttaaattactgattttatgagtataaaaataaaaaataaaaaagtataaagaaaacaaaaataatttagaatccattgcctagaaattgccatggttaagattttaatattgctcaggcccagacagctcagggctttgacattcccacacccattctctgccatcccagttctatctcatcccaaaaccatccattatgaggagagtgtacagctctaggctgcccgggagccatcccgcactctcattttgtgactcggcatcttgggagatggagtcttgggacttagcctggacatgtcccttgcatgtacttcttacaagacttttattcagatgaatattttcccttccaacttaagaagcacag

SEQ ID NO: 8591 - DNA, 478 bp, synthetic construct
  misc_feature 1..478: note = Description of artificial sequence: synthetic polynucleotide sequence
  source 1..478: mol_type = other DNA
ggcttgctggttttgcttcactaaccagcaactgaagcaagacctgacttgtgaaaatgcctaatagagttcagtattagcgctgtttcaccatttcctggatctcttgcctttgtgcacatgatagaattgcacttctctgtgattaatttgtagttaagtgtggtcatgtaactcgctttggtcaattaaatgtaagcataagtgatgcgtgttatttctgggtagaagatgtaagagttggcatatgctttgccatattttctttatccatctggcatggtaaccagtaacattctaggtagtaattgctccatcagtctcagtctctgagtgactaaaattgacagagtcccctgctgaccctcaatgtacatggaacatgaacaagaataagcttttgttttttatattgagattttggagttgtttgttcctacagcattacctagtttactctaatacaacatggaaaaaa

SEQ ID NO: 8592 - DNA, 479 bp, synthetic construct
  misc_feature 1..479: note = Description of artificial sequence: synthetic polynucleotide sequence
  source 1..479: mol_type = other DNA
ctggaacctataataaatagaccctacgttgccatttaaacttctagttctgaggaataataatgtggggaaatactttctatataataaaaaaatagaaaattgcaaaataaaaatatacttatgtatcattcatgtcctattaaaaatgttatttatagactcaccatattcccttcctccagaaaaacagaagtaaaaatatgaaaatgcctgtaatcatgtttttggattatggaatcaagtattgctttttacttttatgttttctgaatttttgttgtacttcactacatttttgagtgccctgatgtattactttcaaaaagaagaagaatactttctgaagccatttcaaccatccccactcacctctctagatcccagtaaccaaatacattatataggactcttcatcagtccttatcaagtttaggaagggcgatgctataccttctttaaaggacacctaccaatgt

SEQ ID NO: 8593 - DNA, 479 bp, synthetic construct
  misc_feature 1..479: note = Description of artificial sequence: synthetic polynucleotide sequence
  source 1..479: mol_type = other DNA
cttagttgcctttcaaagactcctagcacagctaaatgtgatggatatgctctaaggatataagagctgaagtgacttgcataaggtcatatcataacttactgttagaaatggagctagaactcagacccactgagtccttgtctgtgacacactgccctttccatttgtggaagttgttcttgtatctaactttatctgtgctactatttgggcctagccattctccctcttatgcagacaagcagataaacagtaaaactttaggagtggattatgataccatagatatatatcatctatcctttacaaaatagttattacagtcatcaagccttggttagagtttacagaccatgtatcctagctacctcatttcacagattatgacattgggggctaagagatattaagtgacttccttaagtgaaacagtagcagaccaaaagaagtcatgattcccagcatagtgctactca

SEQ ID NO: 8594 - DNA, 478 bp, synthetic construct
  misc_feature 1..478: note = Description of artificial sequence: synthetic polynucleotide sequence
  source 1..478: mol_type = other DNA
ctcatttattcattcattcacccactcacaaacctgtattaagtttctgttatttgcaagaccctgtcagttaggccatgtgggaactagaaggatgaatttatcagtcatccaagattcttacaattaagtattaccgataaggtactcaagaaacagttctcattcacataatttgggttaaaacaaaaagaagccagctttctatatacttttggtccagtctttacgttttttgttttgttttgtttgttttcatgagtatcccgacttccttctaagaacttccacctgagaactgaccacagcgtcagcattccacatgggtgtgtttcctttcccctttcccatttcagtggtttccaatttctttttcttttggcactataaacctttcgcaaaggaaatattagacagaactcctacatgtcaagcaaattaaaatagtggtgaaattagagtggaggacataatcacc

SEQ ID NO: 8595 - DNA, 479 bp, synthetic construct
  misc_feature 1..479: note = Description of artificial sequence: synthetic polynucleotide sequence
  source 1..479: mol_type = other DNA
ctatcatataggctatttgtccatatcatatttgtccctacaaaggcctctaaggcaggggtccccaacctctgggccgcagaccggtaccagtggcctgttaggaactgagccacacagcaggaggtgagcgggagacaagcgggcactactacctgagctctacctcctgtgagatcagcagcagcattagattctcatagaagcgtgaatcctattgtgaactgcacatatgagggatctaggttgtgtgctccttatgaaaatctaatgtctgacgatctgaggtggaacaggttcatcctgaaactatagcctacccccactcccacacccaatccatggaaaaattgtcttccctgaaaccagtccctggtgccaaaaatgttggggaccactgctctaagataccttgtgcttcttggaacatatttggaaaatcatgtagctctcaaattatccctatgtcctgaagccca

SEQ ID NO: 8596 - DNA, 479 bp, synthetic construct
  misc_feature 1..479: note = Description of artificial sequence: synthetic polynucleotide sequence
  source 1..479: mol_type = other DNA
ccttaccatcaatcctcagaaatacccaacccatgtcaggcaacttcacactttctttcttcaggcagcacagttgtctcagggagggaggagagtgctattagcaagaggagtcactaacagcttcactcacctgtgcccatgaatttttaatggtgtgaaaagtctgtgtattttttatggttctctatggctcatataagagggacaaacaatacatgaaagttcagagatggggacaaatatcactttaagctggggataatcagggaagaagaaagttttcatggagaaggtgacttttgaatcaggaagaaatggaaacagcaaactcttctagatagaggagacactaacaggaaaggcagagaggcaggaaggtgtgggaaagtgcacgtgaccccgttcagagagaaagccaggtgtgagataagggggaaagactgttagggcatgtattgtaaaccactaattccagg

SEQ ID NO: 8597 - DNA, 478 bp, synthetic construct
  misc_feature 1..478: note = Description of artificial sequence: synthetic polynucleotide sequence
  source 1..478: mol_type = other DNA
caaaagttagattttacttactaagcaagagtgcttcagttagatcctagcaggaaatggagggtatgcttagaagaggtaactgaggcaagtttaatttataaaggtgtgtgcagcattaagggaaaccagcaagggatactgagcatgccaggatgcaagagcaggcagggaaggtgactattcctaggtctgaaggagaaaggggagggagcagttcccagaaccctagtaaaaatggcaatgagaaaggtccatctggcaggacctatggtctttaacagagggacaaagtcaacccacaacttgtctgggaggttgctgaggaatagataccccaacctctctctcaacccactgcaacactctttttcccctagactgagcccagtcaaagacagagggaggagcccagtgatgcagtctgcaatgtcatcatcctggagcatgaatagagtgcagcagggtgaataatgag

SEQ ID NO: 8598 - DNA, 121 bp, synthetic construct
  misc_feature 1..121: note = Description of artificial sequence: synthetic polynucleotide sequence
  source 1..121: mol_type = other DNA
tctgcaggaattaatagaaatatctgacacaatagggaactataagaggttttgaataggagaggcccctgaaatgtgctccaatattactgaactatgtgtggcccaaagaatggaagag

SEQ ID NO: 8599 - DNA, 1623 bp, synthetic construct
  misc_feature 1..1623: note = Description of artificial sequence: synthetic polynucleotide sequence
  source 1..1623: mol_type = other DNA
gaacagctcttgcaataggtctgaggagagaagctgaagacttggactagggcaatggtaaaaactgtggaaagaagttttaaatgaaaagttttaaaccatgcggcttccagctagatgaacttttttaaaaaaattagttcctcactcaaattttggggaggttatatattttctaatcataaaaaatgatttttcttatttgtgggcttttctccccagatctgaacctgtggtcttgggagccagggtgacctgatatgacatctaaagaagcttctggactctgaacaagaattcggtggcctgcagagcttgccatttgcacttttcaaatgcctttggatgacccagcactttaatctgaaacctgcaacaagactagccaacacctggccatgaaacttgccccttcactgatctggactcacctctggagcctatggctttaagcaagcactactgcactttacagaattaccccactggatcctggacccacagaattccttcaggatccttcttgctgccagactgaaagcaaaaggaattatttcccctcaagttttctaagtgatttccaaaagcagaggtgtgtggaaatttccagtaacagaaacagatgggttgccaatagagttattttttatctatagcttcctctgggtactagaagaggctattgagactatgagctcacagacagggcttcgcacaaactcaaatcataattgacatgttttatggattactggaatcttgatagcataatgaagttgttctaattaacagagagcatttaaatatacactaagtgcacaaattgtggagtaaagtcatcaagctctgtttttgaggtctaagtcacaaagcatttgttttaacctgtaatggcaccatgtttaatggtggttttttttttgaactacatctttcctttaaaaattattggtttctttttatttgtttttaccttagaaatcaattatatacagtcaaaaatatttgatatgctcatacgttgtatctgcagcaatttcagataagtagctaaaatggccaaagccccaaactaagcctccttttctggccctcaatatgactttaaatttgacttttcagtgcctcagtttgcacatctgtaatacagcaatgctaagtagtcaaggcctttgataattggcactatggaaatcctgcaagatcccactacatatgtgtggagcagaagggtaactcggctacagtaacagcttaattttgttaaatttgttctttatactggagccatgaagctcagagcattagctgacccttgaactattcaaatgggcacattagctagtataacagacttacataggtgggcctaaagcaagctccttaactgagcaaaatttggggcttatgagaatgaaagggtgtgaaattgactaacagacaaatcatacatctcagtttctcaattctcatgtaaatcagagaatgcctttaaagaataaaactcaattgttattcttcaacgttctttatatattctacttttgggtaagaggtttgctcagggtcttgcaagtcagtaagtttaatatcctattacgccatttggctcccaaagatttg

SEQ ID NO: 8600 - DNA, 360 bp, synthetic construct
  misc_feature 1..360: note = Description of artificial sequence: synthetic polynucleotide sequence
  source 1..360: mol_type = other DNA
gcctaggaaacagaatgagaccctgtctcaaaaagaaaaaaaaaaagttaccagtttggtagcttagggagttacaagtttggtagctcatggagttgccatagacatagaatatattgatttttaatcacagcacacaacaagatgtacatttatatccttgtgagtaagtgaatatggttgagagaagaggttaggttgacaaagcaactactaaaaaattgtctttttccctctgtcttatgggtaacttggatgaaaacatagaagatgagcttataatatatgatgattaataaagtagggagagagagtcagttggatagaagagtttctatttcaaaatcccaggttgccaca

SEQ ID NO: 8601 - DNA, 359 bp, synthetic construct
  misc_feature 1..359: note = Description of artificial sequence: synthetic polynucleotide sequence
  source 1..359: mol_type = other DNA
actccagcctgtacaacagcatgacgccctgcctcaaaaaataaaaataaaaaataaaaaaattaagtcccaggttgaatcacgaggtcaaaaccaaagaggtagaatgaaaggtcctgcttttgatccacacacctaagatggaagagcagtttattagcagttaatatgaaaaagttctggggatttaatagaaaagaatttaaacagtatcatactcataaactacaaatgtgccctaagtacaaatgcaggttgaattgaaatccaattgcttaaaaactaaggaggttgggcatggtggttcatgcctataatcccagcccattaagaggccaaggcaggtggatcacttgagc

SEQ ID NO: 8602 - DNA, 475 bp, synthetic construct
  misc_feature 1..475: note = Description of artificial sequence: synthetic polynucleotide sequence
  source 1..475: mol_type = other DNA
taggaggatcacctgagcccaaggagatcaaagctgcaatgggccatgacctcaccactgcactccagcctaggcaacaaagtgagaccctgtctcaaaacaaaacaaaaacactaaggagaacttcagcagtgttgacaggacactgttcagaactgggaacaaatagtcctatggaacctactatgtctaggccagcctacctctagaatattttgttctattctgggcccgacttgttaattgggacatgaataaatgagagtagatctagagggaagcacccaagatggcaatcgggcttgaagccacccctagactaggaatattggaagaagctgggcgcatttctcctggagaagaattatcaagggaagacatgagagccaagatcaatgggtgcaagttacattgaagaagaatttggcccagaaatggaaagaattcactaacaactagagctgttcatcaaagg

SEQ ID NO: 8603 - DNA, 477 bp, synthetic construct
  misc_feature 1..477: note = Description of artificial sequence: synthetic polynucleotide sequence
  source 1..477: mol_type = other DNA
ttaacctcctggttcctggatatatctacatagcctggagctaccatttttcaggatactctggaaagtattcttcccttaggtgatgaattacaaatcttcttactctaagatcccataattcttcaaactagacacttaactcctatgagcctcagtttcctgagaagactaaaatgaaatggcttgtaaatccccttccagctctaactttctatgaagtacttggtcctaaagggtaccctcgtttatgtttcacagagataccagaaacaggagtcttttatcttcaacttgactctcaagatgttatcctcaagtgaacttttttctaccagctgaaatatgtccttaaaatctttgagtcaatgaatcatgaaatgagccaggttttcaaatctcatttgtagggttccttaagaactatgtccacttgccacattcttttctgaatattattctttttttcttcaaccc

SEQ ID NO: 8604 - DNA, 476 bp, synthetic construct
  misc_feature 1..476: note = Description of artificial sequence: synthetic polynucleotide sequence
  source 1..476: mol_type = other DNA
tgttttttaacccaaacatcctgttttcaaacatcctgttttcaaccctctttgtatctaaggatggaacaaggctgatgacacagacaagaaacttgtaaaacatagcaagtatctgccttttatttggtgaataatgtcaggactagagaagggctgatgtgaaattctgggctgggctttaaggctttaaggcatagttttgcctcaaagaattgcctccacacaggacaagtcactgtaagcaaagtatgtggctgcatctggacatgacaggaggtgagctgggaagtccctgccctttccctgcacatgcacttaccccatttctccatctttctacctcaacacttcaccttcagagataatttctttcaggcctcaaagcatttttagactttaagttcttttgttgctgtttattagctcaaccagggccatgtaccagaacctgggggaaagggccatttctatgg

SEQ ID NO: 8605 - DNA, 477 bp, synthetic construct
  misc_feature 1..477: note = Description of artificial sequence: synthetic polynucleotide sequence
  source 1..477: mol_type = other DNA
aaatggagatagggtccaggcctatcctgagaaagtgcaatcatgaggagaccatcctgttctttctcatgtattttatcattcatttggtactaagcactgtactaggcaccaagatagatagtaaaacatcagccttgtcttcaaagggtttgcagatcacagaagccctctctctctctcatcttttacatagatgatatcctatataacaagaagagatgtcacaggatgactaaaacaggcaaagcagctggaatatgtgtgtggctggggcagcccatgacagggccttaaccctagtaatgacgctgacagctttagtcactgaggggagtggccagaacctgctggtttggtcaatgggggacaacaatcaagtaagggaaaagtgatcttataaggactggagggaagtcaacagaaaatctcagccaagtgccatacatttttttctatagagttctatattttctg

SEQ ID NO: 8606 - DNA, 478 bp, synthetic construct
  misc_feature 1..478: note = Description of artificial sequence: synthetic polynucleotide sequence
  source 1..478: mol_type = other DNA
gaactcatatacagaattaagtaagagtcaccctgggctatattggtaagggcaaagagctggaatttcttacaactttattttgaagcctcaagcagcggaaggcagatggaagaagtaacatgtggtggtggttctcagaatttttaccacccccaaaacatggaagataattcctcactctccggtcagtaacaaccactgacttctgcaaagattcacagccatttggggtacatatcagaatatcatggagaagcaggaagtggggagcaatttcataaagcttcctacttgagtctaatataaccctttcctacctgccctgagatctataggtagcttgcctgagttgaatccagctctgccattaaccagctgcatgactacagacaagtcgttctctttgaaccttagtttcctcatacataaaataacgaaccttacctggcagtgttattgagaggaactacagaac

SEQ ID NO: 8607 - DNA, 357 bp, synthetic construct
  misc_feature 1..357: note = Description of artificial sequence: synthetic polynucleotide sequence
  source 1..357: mol_type = other DNA
aattagctactagtacaataatttgttttaaaagctatattataggataacagagtctactcagtcagcctttatgcaaaagtgaaaatcttgggattctcagaaatatgctctcaacagtaaatgccctatgtaacaaggtgcaccagcttaggctggggccattgggcccataaaatcttcattgttaaagttaagaagttgggtacaaggacagagaaaagctactattcccaagttgccaaattaaaaaaattacctatctggaaggtaaattttttttaccccttaacagatctttaagtgtataatagaagggagattcaaaatttacatttgaaactgattgtttgaggg

SEQ ID NO: 8608 - DNA, 475 bp, synthetic construct
  misc_feature 1..475: note = Description of artificial sequence: synthetic polynucleotide sequence
  source 1..475: mol_type = other DNA
gaaaaaatctaaataaaaattttaacaatcatataaatataaagccaagatcttaatctggaatgggaaggttaagaccattcattaattcaacaaatatttactgagcagccctgagactgttttccttggggtctgggaaggggagccatggtcaatggactcttgttatctgtaggaatattgatccctaccacaaggtacagggacagggaataaaggggagatagtcctcctatgagataaaggtaggggatgttctacagggcccagttttatatttttcttttctgccttgttatttcttctcatgattttctttcagtaaaatctctttcccacatctctttcagtaaaattttgttaaatgatagtcttgttctctgttttggggaattacaagatggactcttaatggggctctattagtagatggtaagaattcctgggaatttccagaaattctttgggaaaa

SEQ ID NO: 8609 - DNA, 479 bp, synthetic construct
  misc_feature 1..479: note = Description of artificial sequence: synthetic polynucleotide sequence
  source 1..479: mol_type = other DNA
gtcagagactaatcttctcacagttacataaggggatgaagctgaaagttatttgggcattaattagaagtgtggcccactgaaggctggtgaaatctggacacctctgctatacatggtccttgtggatggtttgaatgatattcccaaattggctgggcacattcccatgatatcaggccgatgggcattaaaaatgcaaattagttcacatgctggggtacaatgccctgaaccagctgactttaatggactgcagattgccaatccaaggctatgttctttcattcctttccttgccttacttacttatcattcatccttcccctaagttctcttgggcctattgcccaaataaaagtgaagaagaaattaacacatatgaaagcgtgctatgctaagtaccatgtggggtgtgttttgcatgaattattttacttaaccccttacaacaccttggcaagataggcaggattatc

SEQ ID NO: 8610 - DNA, 121 bp, synthetic construct
  misc_feature 1..121: note = Description of artificial sequence: synthetic polynucleotide sequence
  source 1..121: mol_type = other DNA
agccggaaagaggaggacacagcccaagcagaggaggaagaaccttttcaggatgggacttacgactgttctgtgtcctaacagtgaggttccatcacaaaggggcagtattaattagcag

SEQ ID NO: 8611 - DNA, 121 bp, synthetic construct
  misc_feature 1..121: note = Description of artificial sequence: synthetic polynucleotide sequence
  source 1..121: mol_type = other DNA
agaagtcattattttcgatagaaaagcattacactgaggcatcagaagacaacgttccaattcgtaaaagactatttctggcaaatttagaatttgctgagctaaacaaaggaaatgccca

SEQ ID NO: 8612 - DNA, 121 bp, synthetic construct
  misc_feature 1..121: note = Description of artificial sequence: synthetic polynucleotide sequence
  source 1..121: mol_type = other DNA
acaaaaagggtcaaagtggttttcactgttgaccaagacaactgtttcttcagccagtcgaaggcaaaactgatgatgtaacaatggctattgggttgggtgttctcattgcccttcagct

SEQ ID NO: 8613 - DNA, 121 bp, synthetic construct
  misc_feature 1..121: note = Description of artificial sequence: synthetic polynucleotide sequence
  source 1..121: mol_type = other DNA
ctgccgtggatgtgatggacattagaaagcttttggctgacttccctttcaccgtacctttagttgcttctcctgaagtccagagaaacctaggaagtttgtgttttctctttctctgtca

SEQ ID NO: 8614 - DNA, 121 bp, synthetic construct
  misc_feature 1..121: note = Description of artificial sequence: synthetic polynucleotide sequence
  source 1..121: mol_type = other DNA
gacatgtcaggtgattttctcggggttacatggccaagttaatggcaaatgctagatttctagacttcttcatatttagaccagaacctttctaccttcctctgctactgagtcaattcat

SEQ ID NO: 8615 - DNA, 121 bp, synthetic construct
  misc_feature 1..121: note = Description of artificial sequence: synthetic polynucleotide sequence
  source 1..121: mol_type = other DNA
aaattataaataagaattgttcagaccctccttgctagtgggaaatgtgctgtcatctattggactattattagctctagaaatggaagctacaatgcctgggttagtcttagactcttgg

SEQ ID NO: 8616 - DNA, 121 bp, synthetic construct
  misc_feature 1..121: note = Description of artificial sequence: synthetic polynucleotide sequence
  source 1..121: mol_type = other DNA
gttttgcattataagtgctcagaggtttacaaaacctaataatgatgactgttttactaatgatggttctgcgcctgtgaatacactgtggcacatgtggtcaaatataccaagagtcttt

SEQ ID NO: 8617 - DNA, 121 bp, synthetic construct
  misc_feature 1..121: note = Description of artificial sequence: synthetic polynucleotide sequence
  source 1..121: mol_type = other DNA
aaacattgacttttgcttttctttcattttcatagaaatgcctcttattaagtatgtaactgctcacaccatatagcagcctcactttggagtaagcccaccggcaacatcagtttgggag

SEQ ID NO: 8618 - DNA, 121 bp, synthetic construct
  misc_feature 1..121: note = Description of artificial sequence: synthetic polynucleotide sequence
  source 1..121: mol_type = other DNA
attcaaattttactgaagactttgagagataactacattggccaataccacatagataataagcagtaaagcaaggatttgaatttaaatatgcttacaacttttcacttaaaacttccaa

SEQ ID NO: 8619 - DNA, 121 bp, synthetic construct
  misc_feature 1..121: note = Description of artificial sequence: synthetic polynucleotide sequence
  source 1..121: mol_type = other DNA
agcatgttaggtgttggggtacaatgatgcataaaggcctagtccttgctcttgggaatgtcacacagttgtagacgtggcagaacacagagaggaaagtatggatttgcatggagcagca

SEQ ID NO: 8620 - DNA, 121 bp, synthetic construct
  misc_feature 1..121: note = Description of artificial sequence: synthetic polynucleotide sequence
  source 1..121: mol_type = other DNA
agatgtaactttatgtttatcctgccacttcattaaataactacactccattttgtacttccaaattgcaggaatatgcacaccagtttgagaagcacaaaataatacatgaagtaaatgg

SEQ ID NO: 8621 - DNA, 121 bp, synthetic construct
  misc_feature 1..121: note = Description of artificial sequence: synthetic polynucleotide sequence
  source 1..121: mol_type = other DNA
aatacactatcagagaaagggaatattttaagcttagtctgacagcttcctttacttgctaaggactaaatgtcacaaacttgtaggaaaagtctggcccatttcccctatcccctgggaa

SEQ ID NO: 8622 - DNA, 121 bp, synthetic construct
  misc_feature 1..121: note = Description of artificial sequence: synthetic polynucleotide sequence
  source 1..121: mol_type = other DNA
cactagggatcaatcagcctcttgacattcactgagtcaatgtcctgaatctgttcaacttttgtcaatctctcttctacctgctctattttctaactgaaatcaatcttgtggcacagac

SEQ ID NO: 8623 - DNA, 121 bp, synthetic construct
  misc_feature 1..121: note = Description of artificial sequence: synthetic polynucleotide sequence
  source 1..121: mol_type = other DNA
aggaatgctgatctcagtatctggcatatagtaagtggctcaataataggaatttctattttttcatccacccatccctcgtttttcctctgatctgtgcagacacactgaaagatgagtg

SEQ ID NO: 8624 - DNA, 121 bp, synthetic construct
  misc_feature 1..121: note = Description of artificial sequence: synthetic polynucleotide sequence
  source 1..121: mol_type = other DNA
gataatgaacagatggacagaatagtcatcccttagacagacctagtgtgcagaagatgttaatatgtgacaaagacagcatcacatgctaatcccgcaaataagcaaagaaatgaaaatt

SEQ ID NO: 8625 - DNA, 121 bp, synthetic construct
  misc_feature 1..121: note = Description of artificial sequence: synthetic polynucleotide sequence
  source 1..121: mol_type = other DNA
tttactctctgggagatcaatgatcaccttctgaacgtccttcctcctttgctctcattatccatcattcggcttagagacttggggaatggagaaccatgagtattattttaaaaatcct

SEQ ID NO: 8626 - DNA, 121 bp, synthetic construct
  misc_feature 1..121: note = Description of artificial sequence: synthetic polynucleotide sequence
  source 1..121: mol_type = other DNA
gtttcccatccaccaggcacactcctgcctcagagcccttgcattagctgtttccaaggactggagagctcttcctccagatacacccaagacaaattccttcagcctcctttaaatctta

SEQ ID NO: 8627 - DNA, 121 bp, synthetic construct
  misc_feature 1..121: note = Description of artificial sequence: synthetic polynucleotide sequence
  source 1..121: mol_type = other DNA
ttgccagtgctgcagaaagtatctatggctgattggagtcacagtttggacggacctctggttagattagatggaagtggaaactaaaacttctaactggctcaccaggaagttgggaatt

SEQ ID NO: 8628 - DNA, 121 bp, synthetic construct
  misc_feature 1..121: note = Description of artificial sequence: synthetic polynucleotide sequence
  source 1..121: mol_type = other DNA
agagcaatcagtataggtaaatttacccctaactcattatatgagtttttcaagtgttttggggaacaggaatgttttccaaagggaggtagaaatacagaaactaagagtagtatgggag

SEQ ID NO: 8629 - DNA, 121 bp, synthetic construct
  misc_feature 1..121: note = Description of artificial sequence: synthetic polynucleotide sequence
  source 1..121: mol_type = other DNA
cttccttcatcagagatgtgtatttcaccctggctttccaccctattgttcttattgtatgattccctcttttcttgcacttggatttcttccttggtgccattcgtttcactgtgtgtgt

SEQ ID NO: 8630 - DNA, 121 bp, synthetic construct
  misc_feature 1..121: note = Description of artificial sequence: synthetic polynucleotide sequence
  source 1..121: mol_type = other DNA
acctgcttgatagtgtgtttaactcaataactggctaatgtatttcatgtcttataggttagaagtttcatgcattcaaataatggcaccatttctgtggtatctgtattgtgaaccatct

SEQ ID NO: 8631 - DNA, 121 bp, synthetic construct
  misc_feature 1..121: note = Description of artificial sequence: synthetic polynucleotide sequence
  source 1..121: mol_type = other DNA
ctgactatagctacttgcctgaaagcagttttattggagcagctattggcttcttcattacaggaggaaaaaaaggcaagtgagcacatttcttgaattttatcattctatctccatgttg

SEQ ID NO: 8632 - DNA, 121 bp, synthetic construct
  misc_feature 1..121: note = Description of artificial sequence: synthetic polynucleotide sequence
  source 1..121: mol_type = other DNA
aactgctgcagctgcttaatctcctcagggatgtcaaagttcatcctgtccttgaggcagtattcaagcctcccattcaattgccacaggagcttctgacactgaaaattgctgcttcttt

SEQ ID NO: 8633 - DNA, 121 bp, synthetic construct
  misc_feature 1..121: note = Description of artificial sequence: synthetic polynucleotide sequence
  source 1..121: mol_type = other DNA
atttctgctctgacaacctcccatgcacaagggctgtatttcttctctgtcagatagagggtgattctttgaaagtattttctcacagtcaggatagagtccacattcatcagaggagtgt

SEQ ID NO: 8634 - DNA, 121 bp, synthetic construct
  misc_feature 1..121: note = Description of artificial sequence: synthetic polynucleotide sequence
  source 1..121: mol_type = other DNA
ccacgaaggtggcttgcttccaagtaactacatcattttcctgtaatgccatcccagttggtttcctcatgcatgcttgatgattctcctcactatgcatctttttggacttccagatttt

SEQ ID NO: 8635 - DNA, 121 bp, synthetic construct
  misc_feature 1..121: note = Description of artificial sequence: synthetic polynucleotide sequence
  source 1..121: mol_type = other DNA
aagttattagtcataagaaatattaatagtgtatggcaaaaagaggttcagctcccagtgtctatggctccagagttggtggctcttgacttctctgctatcacatccctacaacaaatgt

SEQ ID NO: 8636 - DNA, 121 bp, synthetic construct
  misc_feature 1..121: note = Description of artificial sequence: synthetic polynucleotide sequence
  source 1..121: mol_type = other DNA
ttcattgcatgcagccatctgatgccttaattttggggaagataaaaaatgttgattgcgtcctccttgcaaggtatggtattttaagctttttggatgttactactaaaggataatttaa

SEQ ID NO: 8637 - DNA, 121 bp, synthetic construct
  misc_feature 1..121: note = Description of artificial sequence: synthetic polynucleotide sequence
  source 1..121: mol_type = other DNA
gccctgtaggaccttcggtgactgatgatctaagtttcccgaggtttctcagagcctctctggttctttcaatcggggatgtctgcagagggcagaaagaaaacaggcgttagaaacctga

SEQ ID NO: 8638 - DNA, 121 bp, synthetic construct
  misc_feature 1..121: note = Description of artificial sequence: synthetic polynucleotide sequence
  source 1..121: mol_type = other DNA
aggctctggcgctcctcggcggaatcccgtagcttccctacgcatgcctgcttctacaaacccacaaatggtttccgatcatttctgaaacaaaatggatgctcatttattcatgtgctct

SEQ ID NO: 8639 - DNA, 308 bp, synthetic construct
  misc_feature 1..308: note = Description of artificial sequence: synthetic polynucleotide sequence
  source 1..308: mol_type = other DNA
cctgagggaccttccgcggcatctatgcgggcatggttactgcctctggtgccccccgcagccgcgcgcaggtaccgtgcgacatcgcgatggcccagctcctcagccaggtccacgggcagacggccccaggcatcgcgcacgtccagccgcgccccggcccggtgcagcaccaccagcgtgtccaggaagccctcccgggcagcgtcgtgcacgggtcgggtgagagtggcggggtcggcgcagttgggctccgcgccgtggagcagcagcagctccgccactcgggcgctgcccatcatcatgac

SEQ ID NO: 8640 - DNA, 352 bp, synthetic construct
  misc_feature 1..352: note = Description of artificial sequence: synthetic polynucleotide sequence
  source 1..352: mol_type = other DNA
ctcattcctcttccttggcttcccaagcccccagggcgtcgccaggaggaggtctgtgattacaaaccccttctgaaaactccccaggaagcctcccctttttccggagaatcgaagcgctacctgattccaattcccctgcaaacttcgtcctccagagtcgcccgccatcccctgctcccgctgcagaccctctacccacctggatcggcctccgaccgtaactattcggtgcgttgggcagcgcccccgcctccagcagcgcccgcacctcctctacccgaccccgggccgcggccgtggccagccagtcagccgaaggctccatgctgctccccgccgccggctccat

SEQ ID NO: 8641 - DNA, 194 bp, synthetic construct
  misc_feature 1..194: note = Description of artificial sequence: synthetic polynucleotide sequence
  source 1..194: mol_type = other DNA
cctggtcttctaggaagcggctgctgccctagacgctggctcctcagtagcatcagcacgagggccacagcggcgggcgcccctggcgctgcccactcccccgtgagccgcgggatgtgaaccacgaaaaccctcactcgcggcgggccgcacgcgcgccgaatccggagggtcaccaagaacctgcgcaccat

SEQ ID NO: 8642 - DNA, 262 bp, synthetic construct
  misc_feature 1..262: note = Description of artificial sequence: synthetic polynucleotide sequence
  source 1..262: mol_type = other DNA
gtcagtcccccgtggctgtgcgcaggtaccctgcaacgtcgcggtggccccgctcctcggccaagtccacgggcagacgaccccaggcatcgcgcacgtccagccgcgccccggcccggtgcagcaccaccagcgtgtccaggaagccctcccgggcagcatcatgcaccggtcgggtgagagtggcagggtctgcgcagttgggctccgcgccgtggagcagcagcagctccgccacgcgggcgctgcccatcatcatgac

SEQ ID NO: 8643 - DNA, 238 bp, synthetic construct
  misc_feature 1..238: note = Description of artificial sequence: synthetic polynucleotide sequence
  source 1..238: mol_type = other DNA
tctaggttccagccccgatccgccgaggccgcgccccgcgttcgcgcgccccctgccggcgaggccctggggccccagctacctggatcgcgcgcctcccgaaacggttgactccgttgggatccgcgccggcttccaggagctgtcgcaccttctccactagtccccgcgccgcggcgctggccagaccctcatcgctgccgcccccactgggcatgcccttgttctcctcgcgcat

SEQ ID NO: 8644 - DNA, 121 bp, synthetic construct
  misc_feature 1..121: note = Description of artificial sequence: synthetic polynucleotide sequence
  source 1..121: mol_type = other DNA
ttctatttttattttttggcaagaatactttatatctgagattctgtactcctgttgtacgacaccagaaggcatgtaacttctggttactccacttttagtgatgttaagatttattagt

SEQ ID NO: 8645 - DNA, 121 bp, synthetic construct
  misc_feature 1..121: note = Description of artificial sequence: synthetic polynucleotide sequence
  source 1..121: mol_type = other DNA
agagccgagaatccacagtccacgggcggccctgcggcgggggctgcgctgggactgggtgccttgagacaggccagtggttccgcgacccccgctttcgaagttttccagcaagattatc

SEQ ID NO: 8646 - DNA, 121 bp, synthetic construct
  misc_feature 1..121: note = Description of artificial sequence: synthetic polynucleotide sequence
  source 1..121: mol_type = other DNA
atcccatggtgaaagggcaaagagaaggggagagagagaataaaaggagagagtgaaaatgtcaaaatcttttaataatggctaaataataaaccctatcaataacaaaccctctcttgca

SEQ ID NO: 8647 - DNA, 121 bp, synthetic construct
  misc_feature 1..121: note = Description of artificial sequence: synthetic polynucleotide sequence
  source 1..121: mol_type = other DNA
agtgatgcttctgggaaaaatgataagatattctgtatgtccaaggatgtcataaataccgaaaaggcaaatctacatccagaatatatgtctagtacagtaaaatcagagagctgccact

SEQ ID NO: 8648 - DNA, 121 bp, synthetic construct
  misc_feature 1..121: note = Description of artificial sequence: synthetic polynucleotide sequence
  source 1..121: mol_type = other DNA
atataaatgggagttttgaacatattttaggcaaaaatttatgtttcttgttcacttttttgccttgctatgatggatcaaatgtatttaacatgaactttgagtgacttttgtaaacccg

SEQ ID NO: 8649 - DNA, 121 bp, synthetic construct
  misc_feature 1..121: note = Description of artificial sequence: synthetic polynucleotide sequence
  source 1..121: mol_type = other DNA
gggacaaaggtcaagggaaaagactgctgggtcttaggggattaagaaactatagacatctgaagaaattgccactaaggaactcagctgacggtagcactgaatcagagatttgccatct

SEQ ID NO: 8650 - DNA, 121 bp, synthetic construct
  misc_feature 1..121: note = Description of artificial sequence: synthetic polynucleotide sequence
  source 1..121: mol_type = other DNA
caggtcaagtgacgtgatcctgctctgaggaagcctctcgtgacccaagccaagggagtaaactctacaacagggagaagaaatgggagaataggaagaagtaaaagaaggagggaattca

SEQ ID NO: 8651 - DNA, 121 bp, synthetic construct
  misc_feature 1..121: note = Description of artificial sequence: synthetic polynucleotide sequence
  source 1..121: mol_type = other DNA
atcctcaaattaatcccagtagttgagtgttttcattaggtaggttaaaaacatagctcctctgttggatacagacactaaaatactctgtcatgtacaaactccaaagcagaaagaatga

SEQ ID NO: 8652 - DNA, 121 bp, synthetic construct
  misc_feature 1..121: note = Description of artificial sequence: synthetic polynucleotide sequence
  source 1..121: mol_type = other DNA
ggaagccttgggtaggttacttcttaatccaacttgagcagtagtgggcttactacttcgtgtaacatatcaattttacaaatttaccttgcatgtcagggataaacataggtgtttcaca

SEQ ID NO: 8653 - DNA, 121 bp, synthetic construct
  misc_feature 1..121: note = Description of artificial sequence: synthetic polynucleotide sequence
  source 1..121: mol_type = other DNA
atgccaagaatgtgaccaggacctaggaatacaaaagtgagtgaaggacgttatcctggtttttacagtctatttggacttgaatcttgcaacttatcacttgtatatctcagacaaatca

SEQ ID NO: 8654 - DNA, 121 bp, synthetic construct
  misc_feature 1..121: note = Description of artificial sequence: synthetic polynucleotide sequence
  source 1..121: mol_type = other DNA
gaccaaaggctctatgtcaaaaggattatagatacctgtacttgcaactggggtttctacggcagatttataactattgggttatttcagggtttccaagttaagatctgatggagagagg

SEQ ID NO: 8655 - DNA, 121 bp, synthetic construct
  misc_feature 1..121: note = Description of artificial sequence: synthetic polynucleotide sequence
  source 1..121: mol_type = other DNA
cagttgaactaactctcacacatatcgaagtagagttctaaaacagcatttgatgataaaggttagcataaatctggaagctgttcctctgacctgaataggtgcttagagaatattagca

SEQ ID NO: 8656 - DNA, 121 bp, synthetic construct
  misc_feature 1..121: note = Description of artificial sequence: synthetic polynucleotide sequence
  source 1..121: mol_type = other DNA
atatgtctctcaagctttgagtgatatgagttagaaagttagtgagcaagtcttacataccaaatctagcattcagacctcattacctctttaaatatccatatcccaaagtcatatacct

SEQ ID NO: 8657 - DNA, 121 bp, synthetic construct
  misc_feature 1..121: note = Description of artificial sequence: synthetic polynucleotide sequence
  source 1..121: mol_type = other DNA
aaaaagttagatactcaaaacttatcacataatatctaaacttctctttcacattaatcatataaaattcaagtgaatgcgtgtcagttgcattatgccaaaatgacttttagcatgcaag

SEQ ID NO: 8658 - DNA, 121 bp, synthetic construct
  misc_feature 1..121: note = Description of artificial sequence: synthetic polynucleotide sequence
  source 1..121: mol_type = other DNA
caacaaatattgacttttgcttctaaggttaattaactgtatcttacaaacgtattcatgtttctatataaataatgtccgaatatagtgtctgcatgtttgggtaatgttaataaagcat

SEQ ID NO: 8659 - DNA, 121 bp, synthetic construct
  misc_feature 1..121: note = Description of artificial sequence: synthetic polynucleotide sequence
  source 1..121: mol_type = other DNA
gtaaagtccactttaaatataaacttcacctttaacacagtcttttaatttagtgagtcgggaaatgaagtctcagtttacatcatatacatatgatatgcgatatatctactcttaagag

SEQ ID NO: 8660 - DNA, 121 bp, synthetic construct
  misc_feature 1..121: note = Description of artificial sequence: synthetic polynucleotide sequence
  source 1..121: mol_type = other DNA
gtattcgtgagaatgtattataaatgttctatttcgtttctctagaaaaagtggatgctctctttcattaaatatgcactgaaacatttaagtaacattatgataagttgtgataaggttt

SEQ ID NO: 8661 - DNA, 121 bp, synthetic construct
  misc_feature 1..121: note = Description of artificial sequence: synthetic polynucleotide sequence
  source 1..121: mol_type = other DNA
gtttactaatcagttgaccttgggttaataaaaaggggtattaacctggcgagtctgagcaataggatttatgacctattgaaaccatgagataataattgcctgttgttttaagttgcta

SEQ ID NO: 8662 - DNA, 121 bp, synthetic construct
  misc_feature 1..121: note = Description of artificial sequence: synthetic polynucleotide sequence
  source 1..121: mol_type = other DNA
gtattctaaattcacatacataatggaatctcctgaattacctgaatttttagctgttcagattgatatgaatttagcttagcttagaaacccccattccgtaggtgatccaaatatgaaa

SEQ ID NO: 8663 - DNA, 121 bp, synthetic construct
  misc_feature 1..121: note = Description of artificial sequence: synthetic polynucleotide sequence
  source 1..121: mol_type = other DNA
cagcagccctagctgagctcctggtcaacagccagcatcagctgtcagacatcccagttcaggcaacaagttgtgagtaaagaagtagtcttggaacctgacaccctgtagatataagata

SEQ ID NO: 8664 - DNA, 121 bp, synthetic construct
  misc_feature 1..121: note = Description of artificial sequence: synthetic polynucleotide sequence
  source 1..121: mol_type = other DNA
taaccttttctcaactatactctagaaatagattatattctccaaagaagaccataccaatatgtgtttcatttcgcatgctcttcttaaaatgtgttgctgacataccttgatagggcag

SEQ ID NO: 8665 - DNA, 121 bp, synthetic construct
  misc_feature 1..121: note = Description of artificial sequence: synthetic polynucleotide sequence
  source 1..121: mol_type = other DNA
tctggagcagcttgaacagggagggaaaaaaataaaaatatcgaaagtactgtcctcatggcagagttgattgcagtgatcaactaccagttatatgattttgatgaaaatggctcctaaa

SEQ ID NO: 8666 - DNA, 121 bp, synthetic construct
  misc_feature 1..121: note = Description of artificial sequence: synthetic polynucleotide sequence
  source 1..121: mol_type = other DNA
aaaagttaaattacttcctaagaacaggcagcaagacctgacacacaataaaatcgaatgttttcaaattccagaagcttgaaatgtaccaagtttagatttgggggtatgcatttaacaa

SEQ ID NO: 8667 - DNA, 121 bp, synthetic construct
  misc_feature 1..121: note = Description of artificial sequence: synthetic polynucleotide sequence
  source 1..121: mol_type = other DNA
aactatccttcacgaagtatgtaccaaggaggaattcgttagctcaaatttttacttccattgtaaacactgaaaaaggactattttgaaaaacatggctttatttatttaggttttcctc

SEQ ID NO: 8668 - DNA, 121 bp, synthetic construct
  misc_feature 1..121: note = Description of artificial sequence: synthetic polynucleotide sequence
  source 1..121: mol_type = other DNA
gcccatcagagttaccctttcttgagctaaaatggctgggcctttaaaatcttgtttcagttagtcactgcatgataggccacccctagaactgtatgaccttggatgcagcagctctctg

SEQ ID NO: 8669 - DNA, 121 bp, synthetic construct
  misc_feature 1..121: note = Description of artificial sequence: synthetic polynucleotide sequence
  source 1..121: mol_type = other DNA
aatggtatagcaggaaatctataatgtgagactattgtgtagccaagacaactttgtttcattaagactcagagtatcactacaacatgccacatcatatcctgtgggaataatgtctaca

SEQ ID NO: 8670 - DNA, 121 bp, synthetic construct
  misc_feature 1..121: note = Description of artificial sequence: synthetic polynucleotide sequence
  source 1..121: mol_type = other DNA
aataaataatacaaattatttattattgaataataaaacaaattattctctgactttttcagccatttttattcctcatttcttttccagtcttgcttccaagatttgtctgcactcagta

SEQ ID NO: 8671 - DNA, 121 bp, synthetic construct
  misc_feature 1..121: note = Description of artificial sequence: synthetic polynucleotide sequence
  source 1..121: mol_type = other DNA
gctctagcaactgtagacaccggtgtgcgctaaagagggaggtgaaccttcgtagaagaaggaaaattgttttggagaaggggatttttggatcagtgcttgtggctctgactctctttct

SEQ ID NO: 8672 - DNA, 121 bp, synthetic construct
  misc_feature 1..121: note = Description of artificial sequence: synthetic polynucleotide sequence
  source 1..121: mol_type = other DNA
ccttttttcaactggacaacaagtgtcaaaaccctgtggatgtatagggtaaaacaagattggtcacgaaaagagaattgtttctataactggtaatctgacacaatgtcctattgccatt

SEQ ID NO: 8673 - DNA, 121 bp, synthetic construct
  misc_feature 1..121: note = Description of artificial sequence: synthetic polynucleotide sequence
  source 1..121: mol_type = other DNA
aggtcccttttcagtttattcaagtttgttttcatggtgttttatccctcttgataaaaaaaaattcagacttttgtaatttgtgtatgctgatcttcatcaaaaggttcattctctggat

SEQ ID NO: 8674 - DNA, 121 bp, synthetic construct
  misc_feature 1..121: note = Description of artificial sequence: synthetic polynucleotide sequence
  source 1..121: mol_type = other DNA
tttttctgtaaggggccagacagcaaatattttaggcttggagatcattcactctctgtttattcaactttgccatagaagtgtgcttagcgtgaggtagccatataaaatatctaaataa

SEQ ID NO: 8675 - DNA, 121 bp, synthetic construct
  misc_feature 1..121: note = Description of artificial sequence: synthetic polynucleotide sequence
  source 1..121: mol_type = other DNA
ggtgccatcagtgtttggtgcccgcctggctccaagggtcagtgacggtcataggcagtggcggctgcaggtggggcggctcctcgggcggcagcgctataatagtagggggagcctggaa

SEQ ID NO: 8676 - DNA, 121 bp, synthetic construct
  misc_feature 1..121: note = Description of artificial sequence: synthetic polynucleotide sequence
  source 1..121: mol_type = other DNA
cctccgccagtactcaccaagcagccccgggttggggaacctccaggagtcgttgtacgaggaatactgagggtggctgtagggactcccggaaaactcactccctgtgtatggtgggtgg

SEQ ID NO: 8677 - DNA, 121 bp, synthetic construct
  misc_feature 1..121: note = Description of artificial sequence: synthetic polynucleotide sequence
  source 1..121: mol_type = other DNA
gcaaactcaccaggcaccatccctgtcagcgtcggtgctgagtagctgccctgtccagcgggggggacgtgtggagggtacccggggagggtcgtgctcgccaagtcacggcctgaggaat

SEQ ID NO: 8678 - DNA, 121 bp, synthetic construct
  misc_feature 1..121: note = Description of artificial sequence: synthetic polynucleotide sequence
  source 1..121: mol_type = other DNA
cacaatggggtaggactgcgggcctggcacactgctcccgatgtcagcaggggtggggctggccagattggccttcatgtcgtccagcccaccagccagcgaggccatggctgaatactct

SEQ ID NO: 8679 - DNA, 177 bp, synthetic construct
  misc_feature 1..177: note = Description of artificial sequence: synthetic polynucleotide sequence
  source 1..177: mol_type = other DNA
cctgctcgggcttgatgggctctgtggtggtgaagatgtctgagtagtgctgcctctcaaacacgcggtccagcacctccagctgctgctgtgtgaacaagtctccccgcatctgcttccggaggaagtctctgcccggaagcgagtggccgttcggcaccggagactcctgaatac

SEQ ID NO: 8680 - DNA, 121 bp, synthetic construct
  misc_feature 1..121: note = Description of artificial sequence: synthetic polynucleotide sequence
  source 1..121: mol_type = other DNA
gcctcatacggatgtcatcctgttgtgacaccctctgtgagaggcagactgggatggccagtaagcacctaggtactagtcccaacactgccactattgagctgtgtgaccttgggaaatt

SEQ ID NO: 8681 - DNA, 121 bp, synthetic construct
  misc_feature 1..121: note = Description of artificial sequence: synthetic polynucleotide sequence
  source 1..121: mol_type = other DNA
gtctctcttgcgcttgttggtgtcggcgctgggggacgtgatgcccaggatgccgctgatggagtacgacgagccggccgaatccgtgctcaccgaggacacctgcgtcacggagccagtg

SEQ ID NO: 8682 - DNA, 121 bp, synthetic construct
  misc_feature 1..121: note = Description of artificial sequence: synthetic polynucleotide sequence
  source 1..121: mol_type = other DNA
ttaaattttttttaaaagttcctcttacctatgctgtgactggaagctgggactggttggttgggtggctgctgtacttttgtccggatgatcctgtgggcagttgaaaaacaaaattgct

SEQ ID NO: 8683 - DNA, 199 bp, synthetic construct
  misc_feature 1..199: note = Description of artificial sequence: synthetic polynucleotide sequence
  source 1..199: mol_type = other DNA
cctgttgatggaactgacgctaggcacggtgtcattgtcacacacccgctctgccagcagccggtccctgatctcccaggcaaacatggtgggattttggcgtttatattcagcgattttttccaccactttgggtgtggcgacctttggtttggatcctccaattaccccaggcttgatgcttcctgtctcataatac

SEQ ID NO: 8684 - DNA, 167 bp, synthetic construct
  misc_feature 1..167: note = Description of artificial sequence: synthetic polynucleotide sequence
  source 1..167: mol_type = other DNA
cctgccaagaattttgctgacacaaccatggctgacccgaagctgcctggagatgtcgcagggcctgacaccttgatgagcaagttccactatcctctggcggactacatccgggagtggccgtccattcacaaaaacccccccaagctgattcactcctccatgtc

SEQ ID NO: 8685 - DNA, 121 bp, synthetic construct
  misc_feature 1..121: note = Description of artificial sequence: synthetic polynucleotide sequence
  source 1..121: mol_type = other DNA
cggagtttgcacatctggagcccgtatcgcggtcctacctgtcctgctggtccgaggagtcggataatttttctctaaatccattttgatttttcaggacttgatggaatggacagggaaa

SEQ ID NO: 8686 - DNA, 357 bp, synthetic construct
  misc_feature 1..357: note = Description of artificial sequence: synthetic polynucleotide sequence
  source 1..357: mol_type = other DNA
agagttcacaccacaacctgtgcgctggtcggggtgacccatgctggacctccacagaacatggggccattcagctaactcagtaaacacttgctgagcatctgacctgagccaggtcctgtgctgacatctaggactttctacccttaaggagctgtggctttttctctagttggtgagacagatggaaaccccttcagttccactacagatatttttgaaatacctgttatgtgccaggcactttctgaactcgaggtaccgcagtgaaccagacaggtgttatctatgccctcctggggcttctaagccttcagagaagatagacactgtacaggtgagttaagtgctccaaag

SEQ ID NO: 8687 - DNA, 478 bp, synthetic construct
  misc_feature 1..478: note = Description of artificial sequence: synthetic polynucleotide sequence
  source 1..478: mol_type = other DNA
agtatggctcctggtgtgtaagggttcaaatatctgttgatagaaaggataaaggccatgtcatctttattctttctcacagggcccagcatggggcctaacacagttagacttaagtaaatggattcaactcactggtccccagcactgtcctctgcatgatgttaccgaaatggagacaaccaaaactaactggacaacttagtcagctggactggaagactgcacttccaaatggaaaggtttgcagtggctcctttggaaatgtggcttcaagggtggagaggggggaagtgaatgtggggctcgcattataggctttgggggttacagagcttgctggtgttgcttgcccttacgctctgtcaaatctcaggcagatgaaacaagatgtaagctttctaaattatcaatagagggcctgtcattcaaatggaagataagaccagagaaaataaaagtccaccaaaataatgcc

SEQ ID NO: 8688 - DNA, 356 bp, synthetic construct
  misc_feature 1..356: note = Description of artificial sequence: synthetic polynucleotide sequence
  source 1..356: mol_type = other DNA
aaaaaggtttagtccaggaggcctatttgtgttttgaatcaaaattcactgctttagaaagaaactgcatggatttcagtgttctcgtctgtcatactctctcagacttctttcctaccctcagaaagcttccattttaagataggaaagagaagccctgaaacaagaccagtgtaacttaagttacaaagaggcattcatgtgggtctatgtgtgtggagagaggtcacttctagtgtcactggtggtggagacccaggaaaacttcacagaggagatggcattggaattagctcttgaagcataaagaagactaataattaggataagaggaaatgcctctcaggaggaagaca

SEQ ID NO: 8689 - DNA, 360 bp, synthetic construct
  misc_feature 1..360: note = Description of artificial sequence: synthetic polynucleotide sequence
  source 1..360: mol_type = other DNA
aatataggcaacagcctggatgtaggataacctaggacacacttaagtaagaaggtctagtataatttcccttgactctagttcacatgagggtaatagagggaggtaaatgaaccagatcactgaagtctgaatttcaagctaaagagtgtggtttcattttcctcatctataaaatgaagataatatctctgtctcttgcaagaattaaagtgaggccaggcacagtgcatagccctcttcacccatctctccagctcttcgtgttgggctcagcccttcttctggtagtcttctggttccagataatggctatgattccggcactttgggatgctaaggtgggagaatcacctgagc

SEQ ID NO: 8690 - DNA, 241 bp, synthetic construct
  misc_feature 1..241: note = Description of artificial sequence: synthetic polynucleotide sequence
  source 1..241: mol_type = other DNA
tgggaggatcgcttgagcccaggagaacaaggctgtggtgagctgtgattacaccactgtgctccagcctgggcaacagaaggagaccatctcaaaaaaaaaaaaaagttctgcattagatgtatatatattagatatgtatatattagtcattaactacttgcataatgctttgtaaaaagcagctgacacaggctgggcgcagtggctcacacctgtaatcccagcactttgggaggct

SEQ ID NO: 8691 - DNA, 477 bp, synthetic construct
  misc_feature 1..477: note = Description of artificial sequence: synthetic polynucleotide sequence
  source 1..477: mol_type = other DNA
aaaaaaaaaaaaaaggcagctgacacaatggcagtggtggcagcggagaaccatcgaagattttgactaggggagatgagtcacttgtgtggagatgtgttttagattaacacagcactgcacaaattagcaattagcacttttgtaatattagtactcataaattgcttttctttccaaggaattaaaagacatgaacagacatggtaggtggttacatcggtcagggttctctcgagaaacagaaccaatagtagagatttattcaagcttgcacagttgtgtaggctagccagtctaagatctgtagggcaggcagctgaggcaggatttctgtcttaaggcagaattccttctttgggaaacttcagcttttgctcctaaggccttcatctgattgaatgaggcccacccacattatcaatgtcagtctcctttatttcaagtcagctgataaatcacatctacgaaatacct

SEQ ID NO: 8692 - DNA, 476 bp, synthetic construct
  misc_feature 1..476: note = Description of artificial sequence: synthetic polynucleotide sequence
  source 1..476: mol_type = other DNA
tcccagcatcatctagactagcatttgaccaaccaactgggcatcatagcctagccaagttgacatatagaattaggcatcacagtggtctttatcttgaatatggaaactgagacacagactggcaaactgacacagaagcttggccaaattagaattcctagaacccggtaccaggcctaccaggtaactcttgtgtcttatagttttatattatttattcctgctttttacataaaatttaccatagacataaccagactgaatatctatgggtagattgtgccgaatgctgatgcaaaccactctattttggggaggaaagagaggactgacgtcaggtcaggcccacaggtagagacacagactttggcttggtgcgaagaaacacttccagactggagtttccaccagtgggacaggctgcctgggacacacacagctcttggtccccggaggcgagcaacaaaaagctg

SEQ ID NO: 8693 - DNA, 476 bp, synthetic construct
  misc_feature 1..476: note = Description of artificial sequence: synthetic polynucleotide sequence
  source 1..476: mol_type = other DNA
agccacttaacatggtgctgtgaaggagatccaaacatccagccagcatggaccaggggctgagaagagcctccctccgagcctgtatgaattccgataaccccagatactagaaatgatcctcacaattaactgcatccttcagaaaagtccttgctcctctccctaccccttctccaccaccagggagcctgtggagattggagcagaacggggaacctccctgagatggaagccatctgcaggccccactcacttttcctccactggcgccctcttgcctgccagcctaccctggttaaccttcctgggaggagagcttgtcaaagtcgcctccgcctcagcctcctttcacaaccctgcctcatcttccacaccaagtctcagggggcctgcaggacccaccatcatcctggagaagtcatgggtcgccagccacctgtctcctgtgcctgcacccaactaaccatcgcttc

SEQ ID NO: 8694 - DNA, 475 bp, synthetic construct
  misc_feature 1..475: note = Description of artificial sequence: synthetic polynucleotide sequence
  source 1..475: mol_type = other DNA
ctgctaatttgcattgacaaccttcctgcacttggctgctcaggggagttttctggttttatctcctcaattaactttggcctcctgggtcactctggatttcccactgcagacctggctgtggaagcctgcctatatgctccagaggattcttgtcttttcacgagccctcccttcccatctgcaagccaggctgtgcacacagcaacatcttgcaagggagtctcggccatggcaggatttttgaagttctggtgggtgtcagagctgcaaagggccaaaggactgtctagtccactctagcccacccgactttgcctcctctcctcacttcacagatgggaaattgaggcaagaactgagaaaaggcttgcggtggtcatacatcaagtcagaataatggccagacccaggccttggtgccccctcaaccccctcacactctctctgccacattttgtcaacagaaaacaat

SEQ ID NO: 8695 - DNA, 476 bp, synthetic construct
  misc_feature 1..476: note = Description of artificial sequence: synthetic polynucleotide sequence
  source 1..476: mol_type = other DNA
ttgcaaacttcatcaagttaggagggagtgaaaaatgtgtttaaatattgagcttcaacagccttgttacttctaggcaccttcagctatttgcaagaatctctgggcatagcatgagccgggctgtggcatgggagtgaggggctggatggagaagaggcctccctcctgggccaggaagccgactcccatcccctcctttagcaccgtggactgagcacctctaaaataacacctcccatggagttacgatgcgtcagggagcaaatgaactctgagatgcaggaactagacctgaggacaggaggaaactgggaagggagtggggagcagcagcagagcaaacagaaaagatgcccgaaggaagcgagttcctaggccaccaggggccaagaccccagcacgtgctatagattatcttggggttcccaagagaaagaaactctcaagatcagaaagtcactgttgtcttggag

SEQ ID NO: 8696 - DNA, 476 bp, synthetic construct
  misc_feature 1..476: note = Description of artificial sequence: synthetic polynucleotide sequence
  source 1..476: mol_type = other DNA
gactttcagagataatgaagtctagaatgctcttggtacctatggggaaactgaggcccagagagagcctcgcatcccatactgagttgggggcagagccaggactactgcccaggcccgaccccagtgtgagactctttccacaaggtggggaaccagggcgtgggagcagggtttgcaggagacctgaaggaggggacatctatggttgggtgttgaactttttggagccctagaggccagtgaggcagaaacaccacagaggaaagctggggtttctctgtgacaacagactcttgtggtgctatgaagaaactggtgtggttgtgatgaggaaagaaaggctgtgaaagtgaaatttccaatttgtgagaggaggaaactgcaaatgtgttctccatcccatgcaaattatctgtggccttttgtcctgcacctgcagcggctcacaacatacacaacaccagggctcagac

SEQ ID NO: 8697 - DNA, 476 bp, synthetic construct
  misc_feature 1..476: note = Description of artificial sequence: synthetic polynucleotide sequence
  source 1..476: mol_type = other DNA
agggctcagggtcccgcagagtctgaactgggtcttccagctccaaacacagcaggagcacaggggcagagaaagtctccctccagctgtgggggtgtcctgagatgcctgagctgcacctgtagggtgtctgccctcccaagggcctgccaggatgagaacgggcaaacctggccaaggtgaccccattagggactaccctcctagggacagcactcagggccgttcccaatcaccccggatttcctgtcctgctcgtctcctgccacacctccttttgatctacccccaagacacccctacctttttattctgtgaaaatttactcatgctgtgggccctgctggaaatgccctcctactgtttccccaaaccccgtcagaaattccacggggaaactcccttcccttctgctgcaggcaccgtcactgtgtctctcagctctgccccccagcctctgagtaccaccttatcct

SEQ ID NO: 8698 - DNA, 477 bp, synthetic construct
  misc_feature 1..477: note = Description of artificial sequence: synthetic polynucleotide sequence
  source 1..477: mol_type = other DNA
agcccttagctactggcttgtcattgtctctttacgttctcagcctcccacagaagcctgggagctcctcgagggcaggtatctgattcatctctgtatcccaaaagcccagcgttttgcttggcacccattagaggccaggaagggcaaacctcctgtcaaatcccgggggagatgttgctaatcagtcctgaacaccgttcccttggagactcaggcttctcaacgtggtgggtaggccctgcctgtcagccaggacctgctctcccaaaggggcgctccagaaatgtgtgactcagttcagctggaagctcctggcccctcagaggtttgacgccagccctctggtgtgtgatttctgagataccaaggcttacttcctcatgacgcccgcatgctgcctcagcttcactcctgagacagtccaggcaggaagcacagaactcctctcagttctgtactcacactcgatattca

SEQ ID NO: 8699 - DNA, 474 bp, synthetic construct
  misc_feature 1..474: note = Description of artificial sequence: synthetic polynucleotide sequence
  source 1..474: mol_type = other DNA
cactcatacacacgcaagtatgtacacatgcacatatgcacacttgcaccacacatgctgccacatacacaataacacatgcacacgcttgctcacacttgcacacacacacaaatacactcccatcaaatgttttacgggattcaggagtttcagtgaagatttggggctacgaggacaggttacatgacactgggcatagcttcccactgtccttgcagctccccctacccactctctctgtcctctccccctcaattccctccattgttccagcactgccccacctcggtcccaaattctcatccctctgttttatagagccattctactgtctgctctggagttgggaactgtccatacctgtgcctgcagatcccaaacaagggagtgtttcccaaagaggcatttgaatcacatgtttctccgtcttgcttagtatcattatgaacaaatgaatggctgtagcagaag

SEQ ID NO: 8700 - DNA, 480 bp, synthetic construct
  misc_feature 1..480: note = Description of artificial sequence: synthetic polynucleotide sequence
  source 1..480: mol_type = other DNA
aatgtcttgtcacagctctccatttcccattctaaactaacacaattctggccagacataatggctcatgactataatcccagcactttggaaggctgaggtgggaggattgtttgaaccccggagttcaagaccagcctgggcaacatagtgaaacccccgtctcagtttttttaaataaaagaaaaaaaggaataaacacaattcagtgacaaatctcttgttttgggccctactcagtgcctggcactgtgccagacactgcaaatacagagacagtagctcccccaagaaagcaccacagtgcctaatagcaaacacacacacataagcaaacactaggctgggcacagtggttcacgtctgtaatcccagcactttgagaggccaaggtgggaggatcacttgagcccaggagttggagatcagccagggcaacatagaccccatctattaaaaaacaaacaaaaaagcacgcat

SEQ ID NO: 8701 - DNA, 356 bp, synthetic construct
  misc_feature 1..356: note = Description of artificial sequence: synthetic polynucleotide sequence
  source 1..356: mol_type = other DNA
acagagcaagaccttgtcccaaaaaacaaaacgaatagtgacaagtgaaggatgtgactgaggccatcctagaggtagagaaacagcctttctgctgtgatatgaaggacagtcaactttccaggtgagcaagattgggaaggtcatctcaagcaggaggagcagcacgtgcaaggacacaggagtgcctcacctattcttgagcttcatataaatggaatcatccagtgggtactcttgtctctgacttccttagctcagtgagtctgtaagattcacccatggggagaatactctaaagctttgtttcaaacattgagaattggggagctaacttggaggagcccaaactcaac

SEQ ID NO: 8702 - DNA, 479 bp, synthetic construct
  misc_feature 1..479: note = Description of artificial sequence: synthetic polynucleotide sequence
  source 1..479: mol_type = other DNA
acaatagtttcctaatcaccccaccacagaagcagggctctcatgaaaattagcttttatcctcttcttgtaaaagcttccacagaacctaagcctcaaggagcacaatgtatagcaagctcccccaccgcctgcactgagcagcaagagtctcactctagtccacaacttaagatgttctattaaacccagggtggattttctatgcccagtggttttccattttgtcttttaatttttactttaaggacttaattttaacaaaagagccaaattaccaccaagctttgaaatgaactttagaggagttaagaacaggctttggaatatgaagctttaatgaatattggaagacagtaattaaacagccactgtgccctgtctcatgctttacaaaaggcaaggaacagagagatcaaagactggaggtgtttgcttcggaaccactggaaccacctgaggagatttttttttttttt

SEQ ID NO: 8703 - DNA, 238 bp, synthetic construct
  misc_feature 1..238: note = Description of artificial sequence: synthetic polynucleotide sequence
  source 1..238: mol_type = other DNA
cggcttcccaaagtgctgggattacaggcgtgagccaccgcgcccggcccacctgagatttaaagtctcctgtgcccagcctgcacccccagaccaatggcatcggaatctgttggatggggacacagacaccacaattatctcttaagcactcacgtgattccaatgtgcttccaaggttaagagtttctggattgattgacagtgaagtgatgagaaactgataaaggaaaacggg

SEQ ID NO: 8704 - DNA, 477 bp, synthetic construct
  misc_feature 1..477: note = Description of artificial sequence: synthetic polynucleotide sequence
  source 1..477: mol_type = other DNA
tgaagctgaaagagagaggtcttcacaccaaaatacagctcagctttggaaggaaccgagagggctacacccaagcctggtgacaccaagggacatttccaacctctgaggaaggagttctgttatgggctaaattatgttcccccaaaattcatatgttgaagtactaaatcccagtacctcagaatgtgactgtatttgaggctggccctatagaggggtgattaagttaacgtgaggtcactatggagagcctcagtccaatctgacaggtgttcttaatacataagaagaggagaccggaacacacaaagagacccaggggtgcacagggaccacatgaagaggcagccagagggcagccacctgcaagccaaggaggaggcctcagcggaaagcaaccctgccgatgctttggtcttagacatctgtggatgacgtcactcagtgttagtttggtgtagcagcccttgcaaa

SEQ ID NO: 8705 - DNA, 360 bp, synthetic construct
  misc_feature 1..360: note = Description of artificial sequence: synthetic polynucleotide sequence
  source 1..360: mol_type = other DNA
ccaatgcaagcttcatttcagcactttggtcttatgtctaaagagtcttctcacaaggttacttcttcagccacttctcggactcttccctaacaactaatgaggatccccttaaatactgatccactaagatgttcacagaatattcctgataattatggatagtggaaatgtttgacaatgagagaatggagaagtaaatgatagcagtcagttcaatagagcatgaagaagccattaagttatcaagatttttttagcctcttcccttgtcttctaacaaggtctttttttttgtttttttgtttgtttttttttgagacagtctcactcccatcatccaggctggagtgcagtggc

SEQ ID NO: 8706 - DNA, 121 bp, synthetic construct
  misc_feature 1..121: note = Description of artificial sequence: synthetic polynucleotide sequence
  source 1..121: mol_type = other DNA
gtcggcggctgcactgcggatgagaccggtgcgactcatgaaggtgttcgtcacccgcaggatacccgccgagggtagggtcgcgctcgcccgggcggcagagtaagagcctcgcgcgccg

SEQ ID NO: 8707 - DNA, 121 bp, synthetic construct
  misc_feature 1..121: note = Description of artificial sequence: synthetic polynucleotide sequence
  source 1..121: mol_type = other DNA
aggtggagcagtgggactcggatgagcccatccctgccaaggagctagagcgaggtgtggcgggggcccacggcctgctctgcctcctctccgaccacgtggacaagaggatcctggatgc

SEQ ID NO: 8708 - DNA, 121 bp, synthetic construct
  misc_feature 1..121: note = Description of artificial sequence: synthetic polynucleotide sequence
  source 1..121: mol_type = other DNA
aacaatgcactttctgcacaacaggggccaatctcaaagtcatcagcaccatgtctgtgggcatcgaccacttggctttggatgaaatcaagaagcggtaactgcagcttgggatctggag

SEQ ID NO: 8709 - DNA, 121 bp, synthetic construct
  misc_feature 1..121: note = Description of artificial sequence: synthetic polynucleotide sequence
  source 1..121: mol_type = other DNA
agtgggatccgagttggctacaccccagatgtcctgacagataccaccgccgaactcgcagtctccctgctacttaccacctgccgccggttgccggaggccatcgaggaagtgaagaagt

SEQ ID NO: 8710 - DNA, 121 bp, synthetic construct
  misc_feature 1..121: note = Description of artificial sequence: synthetic polynucleotide sequence
  source 1..121: mol_type = other DNA
ctctctctcccctcagtggtggctggacctcgtggaagcccctctggctgtgtggctatggactcacgcagagcactgtcggcatcatcgggctggggcgcataggtgaggctcccaccgg

SEQ ID NO: 8711 - DNA, 121 bp, synthetic construct
  misc_feature 1..121: note = Description of artificial sequence: synthetic polynucleotide sequence
  source 1..121: mol_type = other DNA
tgctctaggccaggccattgctcggcgtctgaaaccattcggtgtccagagatttctgtacacagggcgccagcccaggcctgaggaagcagcagaattccaggcagagtttggtaagtga

SEQ ID NO: 8712 - DNA, 137 bp, synthetic construct
  misc_feature 1..137: note = Description of artificial sequence: synthetic polynucleotide sequence
  source 1..137: mol_type = other DNA
gtgtctacccctgagctggctgcccaatctgatttcatcgtcgtggcctgctccttaacacctgcaaccgagggactctgcaacaaggacttcttccagaagatgaaggaaacagctgtgttcatcaacatcagcag

SEQ ID NO: 8713 - DNA, 121 bp, synthetic construct
  misc_feature 1..121: note = Description of artificial sequence: synthetic polynucleotide sequence
  source 1..121: mol_type = other DNA
acgtcgtaaaccaggacgacctgtaccaggccttggccagtggtaagattgcagctgctggactggatgtgacgagcccagaaccactgcctacaaaccaccctctcctgaccctgaagaa

SEQ ID NO: 8714 - DNA, 121 bp, synthetic construct
  misc_feature 1..121: note = Description of artificial sequence: synthetic polynucleotide sequence
  source 1..121: mol_type = other DNA
tgattctgccccacattggcagtgccacccacagaacccgcaacaccatgtccttgttggcagctaacaacttgctggctggcctgagaggggagccgatgcctagtgaactcaagctgta

SEQ ID NO: 8715 - DNA, 121 bp, synthetic construct
  misc_feature 1..121: note = Description of artificial sequence: synthetic polynucleotide sequence
  source 1..121: mol_type = other DNA
tcaggttctaacagggaacaaaacctatatctctgcccttgtgaaggccacatctcagcagtgagacagacaacaaacaagggaaatgtaaaaaaagtatgtaatatgctaaataatgaca

SEQ ID NO: 8716 - DNA, 121 bp, synthetic construct
  misc_feature 1..121: note = Description of artificial sequence: synthetic polynucleotide sequence
  source 1..121: mol_type = other DNA
agggcaactcgagttgtgtttcacaggctgctttgaaatcccaagacaacacagcaaaaaggcactctcaggtatgtatgtattcattcattcattcattcacaaacgtgtcttgagagcc

SEQ ID NO: 8717 - DNA, 121 bp, synthetic construct
  misc_feature 1..121: note = Description of artificial sequence: synthetic polynucleotide sequence
  source 1..121: mol_type = other DNA
ctagtaaaccatgtacacagtaaacacattcctcacttcactgaacagcagaggcaaccgtttctaagttccagccactcttcatagagctctccaccttggctgacagctaaggatttct

SEQ ID NO: 8718 - DNA, 121 bp, synthetic construct
  misc_feature 1..121: note = Description of artificial sequence: synthetic polynucleotide sequence
  source 1..121: mol_type = other DNA
ctgtattttaggaatattacatcaaatgtggaaatacggaggcacatggtaaactgtcacgtactatacaaatgatcattgtgatgacattttcttaaaatgggttatatgaagtataaag

SEQ ID NO: 8719 - DNA, 121 bp, synthetic construct
  misc_feature 1..121: note = Description of artificial sequence: synthetic polynucleotide sequence
  source 1..121: mol_type = other DNA
atttttattttcattattaaaaaaacaaataacttacatgaagtaataggtgttctaaaactcagcttgaagatgcttttgtatgcaatcctcacaattgaacaaatgtccatgcaaggca

SEQ ID NO: 8720 - DNA, 121 bp, synthetic construct
  misc_feature 1..121: note = Description of artificial sequence: synthetic polynucleotide sequence
  source 1..121: mol_type = other DNA
tcctggaaagctcttgtttatgatggggtaagtgacttattttccttattatactgtatatatttctgctttctcagagacttcagagtatgtgcaggaaactgtgttgctagactctaag

SEQ ID NO: 8721 - DNA, 121 bp, synthetic construct
  misc_feature 1..121: note = Description of artificial sequence: synthetic polynucleotide sequence
  source 1..121: mol_type = other DNA
ggggatattgcaggcacagttgtcccagagaccaacaaggaacccagataccaagaggaccccccaggtgagccattaagaccactcagtttcaacagttgtgttcagaagtgtgtgctca

SEQ ID NO: 8722 - DNA, 121 bp, synthetic construct
  misc_feature 1..121: note = Description of artificial sequence: synthetic polynucleotide sequence
  source 1..121: mol_type = other DNA
tagtgtctcactgtatcaccagatactctacagcaaatggagaaccctggccatggttccttcctggtcctcacgtttgtgatgggttgaccttgaggctggtctcccagaaacattctgt

SEQ ID NO: 8723 - DNA, 121 bp, synthetic construct
  misc_feature 1..121: note = Description of artificial sequence: synthetic polynucleotide sequence
  source 1..121: mol_type = other DNA
agtgtttgatagtacaacagggtgactacagtcaacaataatttattatgccttttaaagtaacaaagacactataattggattgtttgtaacagaaagaaaagatacatgcctgaggtga

SEQ ID NO: 8724 - DNA, 121 bp, synthetic construct
  misc_feature 1..121: note = Description of artificial sequence: synthetic polynucleotide sequence
  source 1..121: mol_type = other DNA
gtttacacattacactctaacaagttttctaaaaaaatgttatcttgttttagggtcaccggattgcctgccacaggttttggagctgtctttcctagacatccaccggattggagcaaaa

SEQ ID NO: 8725 - DNA, 121 bp, synthetic construct
  misc_feature 1..121: note = Description of artificial sequence: synthetic polynucleotide sequence
  source 1..121: mol_type = other DNA
aatctggaaagcagacaggccagggaatgctgcctggaaccttgcggaggtcgagttcagtgctccttaccccatggaggtaggtgtactggtgcgcaccagctgttcactggcactcttt

SEQ ID NO: 8726 - DNA, 121 bp, synthetic construct
  misc_feature 1..121: note = Description of artificial sequence: synthetic polynucleotide sequence
  source 1..121: mol_type = other DNA
ttcgtgaccgagtgaaggaagaggtcagaaaacttaaagaagggcagattcctgtaacatgtcgaattgaagaaatggaaaacgagcgtcacaatttggaggctcgaatcaaagaaaaggt

SEQ ID NO: 8727 - DNA, 121 bp, synthetic construct
  misc_feature 1..121: note = Description of artificial sequence: synthetic polynucleotide sequence
  source 1..121: mol_type = other DNA
ggagagaattttagggctggattcttgagccttctgtggcggatattaagaaggtttagttgtgcttgctttcaaagctttggaaagccgatgttctggacagtctcctcatggacaggct

SEQ ID NO: 8728 - DNA, 121 bp, synthetic construct
  misc_feature 1..121: note = Description of artificial sequence: synthetic polynucleotide sequence
  source 1..121: mol_type = other DNA
tatctattattaggagacataaggtcactgtattaattcgtttaaattattttcacactctctggacacagactcttttacctttgagtaaagctgtcaggatagccaaatcaatgtcctg

SEQ ID NO: 8729 - DNA, 121 bp, synthetic construct
  misc_feature 1..121: note = Description of artificial sequence: synthetic polynucleotide sequence
  source 1..121: mol_type = other DNA
agtgagtagagacccaaagaatactataatgtgcacattttgaatactaattttattatacttttctgatatcccctctaggagaagtcatggaaagcgacagcactcaggacttacatct

SEQ ID NO: 8730 - DNA, 121 bp, synthetic construct
  misc_feature 1..121: note = Description of artificial sequence: synthetic polynucleotide sequence
  source 1..121: mol_type = other DNA
aatctactctgtttgatgtgctggttagagctggagtcttgcttgagaaaggacatgaaaaattgcaggaaatcacaatcaagcctagcaacatcaggtgagtgaaaagcagtgtccaatt

SEQ ID NO: 8731 - DNA, 121 bp, synthetic construct
  misc_feature 1..121: note = Description of artificial sequence: synthetic polynucleotide sequence
  source 1..121: mol_type = other DNA
gttgtctgcttgatcttcccagtcagccaagacacttttaacagagccctggtgtgttataatgtacgtccaactattgttacacatgtacgtaactacttatgattgtcaacctccctga

SEQ ID NO: 8732 - DNA, 121 bp, synthetic construct
  misc_feature 1..121: note = Description of artificial sequence: synthetic polynucleotide sequence
  source 1..121: mol_type = other DNA
ttcaggaagggaaacagactgagcatagttacctgactgatccaagttctcccaactaataattggaagttcgagccttgaacctcagatttttagccctcaattccaagttctcttttga

SEQ ID NO: 8733 - DNA, 121 bp, synthetic construct
  misc_feature 1..121: note = Description of artificial sequence: synthetic polynucleotide sequence
  source 1..121: mol_type = other DNA
atcattatttttaaaagcaatgagcctgtcaattagagcagcaacacgtggtttttcggggtttgcatcctgatgaggtcgaaatctaggggttaaaaaaagaattttaaaaaatataaca

SEQ ID NO: 8734 - DNA, 121 bp, synthetic construct
  misc_feature 1..121: note = Description of artificial sequence: synthetic polynucleotide sequence
  source 1..121: mol_type = other DNA
agtctcttgtccaatcaaggctatagttgtggctggtgcaacaggggttcagttagtcacggttggcatgagctgcaacgtttttttactattgcttatctcaagactagcatttctttag

SEQ ID NO: 8735 - DNA, 121 bp, synthetic construct
  misc_feature 1..121: note = Description of artificial sequence: synthetic polynucleotide sequence
  source 1..121: mol_type = other DNA
aaaataataataaagaaaagaaaaaaagaaaatgctcaagttttctaacccatttgttgctttatttcagatttgtgtcagaaatgctccaaaagaacgtgagtaactttgttcagagctc

SEQ ID NO: 8736 - DNA, 121 bp, synthetic construct
  misc_feature 1..121: note = Description of artificial sequence: synthetic polynucleotide sequence
  source 1..121: mol_type = other DNA
ttcagatgagctcctgagggtggggccttcatgatgggattagtgtcctttgaagaggatacctcagagagtgtgctctctctgcctctctagcatgtgaagacacagtgagaatgtggcc

SEQ ID NO: 8737 - DNA, 121 bp, synthetic construct
  misc_feature 1..121: note = Description of artificial sequence: synthetic polynucleotide sequence
  source 1..121: mol_type = other DNA
taattgctgtactgttttctttcctcaacagtacaaatcaaagtggaggaaaaagaagacgagactgaggaaagctcaagtaagtggtgatgggccacttgggatacatttcctatggaat

SEQ ID NO: 8738 - DNA, 121 bp, synthetic construct
  misc_feature 1..121: note = Description of artificial sequence: synthetic polynucleotide sequence
  source 1..121: mol_type = other DNA
aaatcagccaacttgtataatagtcgccccctctcggaagcatccatagtacgccacggggatccaatctgaaaagcctgtcttgcggccttcactgccttgtcaacatcctcctgtaagt

SEQ ID NO: 8739 - DNA, 121 bp, synthetic construct
  misc_feature 1..121: note = Description of artificial sequence: synthetic polynucleotide sequence
  source 1..121: mol_type = other DNA
tagcccctggatgaaacactgaagaaagcccttacaggtcaccttgaggaggttgttttagctctgctaaaaactccagcgcaatttgatgctgatgaacttcgtgctgccatgaaggtaa

SEQ ID NO: 8740 - DNA, 121 bp, synthetic construct
  misc_feature 1..121: note = Description of artificial sequence: synthetic polynucleotide sequence
  source 1..121: mol_type = other DNA
attttgcaacgcttattagacaaacgttattcacagaatttggaagcttttgcctgataccctatagacttcaggagaaaggtattatggaaaatattactgtagttattattaacaatag

SEQ ID NO: 8741 - DNA, 121 bp, synthetic construct
  misc_feature 1..121: note = Description of artificial sequence: synthetic polynucleotide sequence
  source 1..121: mol_type = other DNA
ctattataagaagtgctgtaatagttttccatgttgtataaccaattaccacagaattagcagcttaaacatgatgcattattatcttacagtttctgtagaacagaagttcagagagggt

SEQ ID NO: 8742 - DNA, 121 bp, synthetic construct
  misc_feature 1..121: note = Description of artificial sequence: synthetic polynucleotide sequence
  source 1..121: mol_type = other DNA
tgctaatgtgttatgctcaggtctttctttatcttcttatagccattagttctgccaccgtggtgacccattaattcattaagctttaatccacaaacccaaaaatggattagtccatcca

SEQ ID NO: 8743 - DNA, 121 bp, synthetic construct
  misc_feature 1..121: note = Description of artificial sequence: synthetic polynucleotide sequence
  source 1..121: mol_type = other DNA
agcttcactcttacagagccagttctgtcacttatattccctgggttagaccttcttgtgttgtccttttgagtagcttttaaacttggtgcacgtgataaacatgtgaggttaaaaagtg

SEQ ID NO: 8744 - DNA, 121 bp, synthetic construct
  misc_feature 1..121: note = Description of artificial sequence: synthetic polynucleotide sequence
  source 1..121: mol_type = other DNA
ccttggagctgcctaaggactcaatgatacaatggaagatagatatcaaaatgactaaggtagttcctgccactaagataggtgactggagtgcatttgcctaatgagttgtactcaagat

SEQ ID NO: 8745 - DNA, 121 bp, synthetic construct
  misc_feature 1..121: note = Description of artificial sequence: synthetic polynucleotide sequence
  source 1..121: mol_type = other DNA
attgaaataatgtggcaatgtaatggaactcaagatatagatcaatggaacagaagagaaagtcaagaaacatgcccaatattttaaacatatttgaaatataattaaatacatatatatg

SEQ ID NO: 8746 - DNA, 121 bp, synthetic construct
  misc_feature 1..121: note = Description of artificial sequence: synthetic polynucleotide sequence
  source 1..121: mol_type = other DNA
tgataaccacaagtgctgttttctgcttttctctccaacccagctgtgaagtttgggaggatgtccaagaagcaaagggacagcctgtatgctgaggtgcagaagcaccagcagcggctgc

SEQ ID NO: 8747 - DNA, 121 bp, synthetic construct
  misc_feature 1..121: note = Description of artificial sequence: synthetic polynucleotide sequence
  source 1..121: mol_type = other DNA
aaggggggtggctgaagagtattaaggaggctagcttgaggggactaggagagtgagctctgatggtcagggaagaccatgaaagacctcagcaggcctgcaaccagactgggtgactgag

SEQ ID NO: 8748 - DNA, 121 bp, synthetic construct
  misc_feature 1..121: note = Description of artificial sequence: synthetic polynucleotide sequence
  source 1..121: mol_type = other DNA
actcacaaagatggcttcaaaacttacctcctcctccttttacattcttcatatggaatagtcaggaaatagcttctattccatatagtgtcaaggggcctaaaataacagcatacttagt

SEQ ID NO: 8749 - DNA, 121 bp, synthetic construct
  misc_feature 1..121: note = Description of artificial sequence: synthetic polynucleotide sequence
  source 1..121: mol_type = other DNA
tataagattgatttttattccaacctccagaagaagaagaacatatttccctactttctgtttccctatatagatatacttatctacatgcttattcagcaaatcagctacaagtttttta

SEQ ID NO: 8750 - DNA, 121 bp, synthetic construct
  misc_feature 1..121: note = Description of artificial sequence: synthetic polynucleotide sequence
  source 1..121: mol_type = other DNA
tagaagttttgtggggaacttcagtgagcctggggctcttcctacaccctttgggtctagtaactaggtcctggtaaagctgtgtggacttaaaaaaacataggatcctagactgctcctt

SEQ ID NO: 8751 - DNA, 121 bp, synthetic construct
  misc_feature 1..121: note = Description of artificial sequence: synthetic polynucleotide sequence
  source 1..121: mol_type = other DNA
tagagaaagaggaataaaaagaataattgggggataaggtacaatggaccagcaaacaacagaatgtcttaaaattatgggaaaaagcaaattgtgaataaagcaatgggtcccccaacca

SEQ ID NO: 8752 - DNA, 121 bp, synthetic construct
  misc_feature 1..121: note = Description of artificial sequence: synthetic polynucleotide sequence
  source 1..121: mol_type = other DNA
ggacgtttggacctgctgtgcgtgctggcgctgctcgggggctgcctgctccccgtgtgtcggacgcgcgtctacaccaaccactgggcagtcaaaatcgccgggggcttcccggaggcca

SEQ ID NO: 8753 - DNA, 121 bp, synthetic construct
  misc_feature 1..121: note = Description of artificial sequence: synthetic polynucleotide sequence
  source 1..121: mol_type = other DNA
tacaggacaatccgccctaacagtgcagtgcgctccatctacaaagcttcaggctgctcggataaccccaaccgccatgtcaactacctggagcacgtcgttgtgcgcatcaccatcaccc

SEQ ID NO: 8754 - DNA, 121 bp, synthetic construct
  misc_feature 1..121: note = Description of artificial sequence: synthetic polynucleotide sequence
  source 1..121: mol_type = other DNA
ggaccaggggccaagaactgcaccttgtgccctgccaacctggtgctgcacatggacgacagccactgcctccactgctgcaacacctctgatccccccagtgcccaggagtgctgtgact

SEQ ID NO: 8755 - DNA, 121 bp, synthetic construct
  misc_feature 1..121: note = Description of artificial sequence: synthetic polynucleotide sequence
  source 1..121: mol_type = other DNA
accatccaaaggattcctgaagtcccgggctcactccctgccagccataagtatgatctgtctgacatgcaagcagttgccaggtttgtcaagtggcagtactttgagggtgatgtttcca

SEQ ID NO: 8756 - DNA, 121 bp, synthetic construct
  misc_feature 1..121: note = Description of artificial sequence: synthetic polynucleotide sequence
  source 1..121: mol_type = other DNA
agaaccatgaaccagaaaagcatcctcttcttccagcatggccaactaaggcttttctttcagcttcaagtcaatactgcaaagaaaagaaaaagagagagaaacatgagaaaccaaatga

SEQ ID NO: 8757 - DNA, 121 bp, synthetic construct
  misc_feature 1..121: note = Description of artificial sequence: synthetic polynucleotide sequence
  source 1..121: mol_type = other DNA
agtaaccacatagctgttattgatggtgaattcttactccttctccatagaagacatttctggatcattgtaaaggcagctagttctgagtgcaaggaaaaaataggaagcagtcaacatt

SEQ ID NO: 8758 - DNA, 121 bp, synthetic construct
  misc_feature 1..121: note = Description of artificial sequence: synthetic polynucleotide sequence
  source 1..121: mol_type = other DNA
gccaacatcatgccagccgctaaacgaaaaccaagtcttacttagctgcctctgatgcttccctcagttcttcatccagtctgcaggagcaaaaattattggtgtggaaaagaaacaaaag

SEQ ID NO: 8759 - DNA, 121 bp, synthetic construct
  misc_feature 1..121: note = Description of artificial sequence: synthetic polynucleotide sequence
  source 1..121: mol_type = other DNA
tcaggacttacttgatgatgctctctggaatgtggatgcaatccattgggatcagcccactgagttctgataagctattgacatatttaattttactgctgaattttgaactaaaaaaaaa

SEQ ID NO: 8760 - DNA, 121 bp, synthetic construct
  misc_feature 1..121: note = Description of artificial sequence: synthetic polynucleotide sequence
  source 1..121: mol_type = other DNA
gacaacattaactgtaccttataaaaggtcgtgtcacagcaaggattgttctgatgaaccaagatggatgaacaatgatgaatgatttcaaattcttcctcaacctattttgaaaaaagaa

SEQ ID NO: 8761 - DNA, 133 bp, synthetic construct
  misc_feature 1..133: note = Description of artificial sequence: synthetic polynucleotide sequence
  source 1..133: mol_type = other DNA
ccgtctgtcaatcatctggtagcatttcttcatccagcctagccctggcatcctccttcttggggttgcaccattcaagtacacaatcatatagtcttcagctaccatcaactctaaagtacttattacatat

SEQ ID NO: 8762 - DNA, 121 bp, synthetic construct
  misc_feature 1..121: note = Description of artificial sequence: synthetic polynucleotide sequence
  source 1..121: mol_type = other DNA
tcactcacaggaaaagattttccatgacatagtggtaatccgcccgactgctgtctggcagaaaacaggcggcaaacacaatgatggcatttagaccgtccccatagtatcctgggggaca

SEQ ID NO: 8763 - DNA, 121 bp, synthetic construct
  misc_feature 1..121: note = Description of artificial sequence: synthetic polynucleotide sequence
  source 1..121: mol_type = other DNA
ttttagtcttagacactgcttaatttaaagggagaatttagccactgaagtgcaacataatctctcatccacacactccagtgaccaaatactagtgagtagacaagtaaaacacctttat

SEQ ID NO: 8764 - DNA, 176 bp, synthetic construct
  misc_feature 1..176: note = Description of artificial sequence: synthetic polynucleotide sequence
  source 1..176: mol_type = other DNA
acctccgtgagaaatgactctcctgtagggctcgatgaccttcatgtcaatgcgctgctcttgttctccaatgaccactgtcctccaaagccggttgtcctcccgttcctcttcggccgtatattctggaatagactctgactcttggccagaatctttgttggctgtgggatctt

SEQ ID NO: 8765 - DNA, 202 bp, synthetic construct
  misc_feature 1..202: note = Description of artificial sequence: synthetic polynucleotide sequence
  source 1..202: mol_type = other DNA
ccatggccagtgtactcaaaagaatctgcttcatcgggggtatcaagttcatccacattgatgtcaatttcatctggactgtccaagttatcatcagagagaatagatccttcactttggtccagagaaagattgatatttggggctgtgagcttgattctccgaggatgagtgtcattaagatccagagaattaggaggtt

SEQ ID NO: 8766 - DNA, 121 bp, synthetic construct
  misc_feature 1..121: note = Description of artificial sequence: synthetic polynucleotide sequence
  source 1..121: mol_type = other DNA
atgaacaaatgctgctctcaccaggcctcatgtctgcagcactgggactcagcacgccctcttcaaaggggatgtccattcctacatcctctgacagtagtctgcaaaaaaagcaaagcaa

SEQ ID NO: 8767 - DNA, 121 bp, synthetic construct
  misc_feature 1..121: note = Description of artificial sequence: synthetic polynucleotide sequence
  source 1..121: mol_type = other DNA
agcagactgccacaagctttgacagttgtagcttctttctgatactcactgtttgtttctcaggccattcattccggtaggagttcaacaaacatttgagtcctagagccatatggaaagt

SEQ ID NO: 8768 - DNA, 121 bp, synthetic construct
  misc_feature 1..121: note = Description of artificial sequence: synthetic polynucleotide sequence
  source 1..121: mol_type = other DNA
ctaaaagctacaccaggacccacctaccttctgaggatgagaggaggctttctaacggagggtgagaaggatgcacgactacagctcttcagcatctctcttctgagcagttaactggaaa

SEQ ID NO: 8769 - DNA, 320 bp, synthetic construct
  misc_feature 1..320: note = Description of artificial sequence: synthetic polynucleotide sequence
  source 1..320: mol_type = other DNA
cccatttggtcttgatatcctggttccgagctcaaggaactctgtctcctcctccatttccgtgtcagggatcatgtttttctgaacaggctgtggtgaaagcatttcccattcattgtcatgggtgacagcctgcaacgtaactgcatccgggccagccctgcctcggctcttactcttctgtgattggctgactggaccagaggcttcctctagtgccaaagattctagaggcttcatttcttccagaatctgcagctggggaccctcacccaagccgagttcagagaacggctccacagtcttgccagaccacccag

SEQ ID NO: 8770 - DNA, 444 bp, synthetic construct
  misc_feature 1..444: note = Description of artificial sequence: synthetic polynucleotide sequence
  source 1..444: mol_type = other DNA
gccctgagtccctggcatccagtgatggatcaccaacctcactatggcccaagaacatccaactctggtcttgtgcagggctttcaaaagatgatctcgtatcgcttttagaagacattttctctgcagagagaccttttctttcatttaaggaggctggctgacatgtgtctgggaagcttgctaactgagttccctgcagccctgtttctttggaacctacatacaattctaattcagctatgctttctctttcttcacaggtctctggctttgagtgtgaattttcttcacggtttacaagtatgtaatccatgtgtagtgcatgacgatcttcattcttctctgtacatctttcttccttgtattctgattttatctgctcaggctctttggtaggaattgttttttcttcttccaattctgatatttccttgctggcac

SEQ ID NO: 8771 - DNA, 358 bp, synthetic construct
  misc_feature 1..358: note = Description of artificial sequence: synthetic polynucleotide sequence
  source 1..358: mol_type = other DNA
ccatttggtggtcctatgtctccacctgctggtaaatcagaattatctgtttctacttcccagtcaacgtttgatggagacaaaatgttggagcctgctcctaccggcaaataaacggactcagggtcttcacgaatatgcagcacagccagctgggatccaggcagtctgtttttggtctcagcctggtttccctcacttcttcgatcaggaagtgcagaaagcactatctctgctgctctgcatcccagagattcatcctctggagacccagcttcctctattgtttcagcactctgggcaggttctgtgagataagacaaatcaaagggaggtgtgtacggtgccagcgactgct

SEQ ID NO: 8772 - DNA, 121 bp, synthetic construct
  misc_feature 1..121: note = Description of artificial sequence: synthetic polynucleotide sequence
  source 1..121: mol_type = other DNA
tcagagaatcttcctccaaaggagggtcaccaccatacaggaagtgttcaggctctctcagtaaatcttcatcgatattctggcccattacatcatattcaaaatcaccccacgaggcttc

SEQ ID NO: 8773 - DNA, 361 bp, synthetic construct
  misc_feature 1..361: note = Description of artificial sequence: synthetic polynucleotide sequence
  source 1..361: mol_type = other DNA
agatgagcagatatcttgcttccctaggtccccatcaactggcgtttccggatggccttcggataatgtcagtttactcatgtcatctattgttcccgtggatgtgttgagacctgaggcatcgctgaaactgtggtcaaaggcagcttcgcttatatccagacaagtgtctgaggctagcaaagcatcaggaaccaaggcaggattctctgtggataaatgtggatcaccatcaaacaaagctcttgcaccaggctgactttcaggagaaaagctgtctgatatccaagaaccgtcaccttctggagttggctcttggtgagttacaaaaatgctagttgccacattttcaatccttggg

SEQ ID NO: 8774 - DNA, 480 bp, synthetic construct
  misc_feature 1..480: note = Description of artificial sequence: synthetic polynucleotide sequence
  source 1..480: mol_type = other DNA
attcttctgtcaactggttccaaaattggtgccatatctgggctggctcctttttctgatacttgtaaacctgtactgttgtcaccgtttatttcagaaggttcaggtgaacctttatgagaggcgggctgagaggagccctttatgtctgcttgatagccaattggaggcagcacagttgcgttttcagaatcgagttctgcattggatgggacaaactcccgtccaggctcataaatgggttcttcatctatctctggctcagtgagacaaagctcactggattccacttcaggtcccatgcaagcactgaggtgcttctcagtctcttgctttgcttcagaatcgtgacatatatcagggctgtcggaagcctgagaattgctgtcatgttcgcagtgcgtcaggatatcaggattctcaccatctgctttcaaactgaagggcttcttagcatctatccacaagtcaggcgcggca

SEQ ID NO: 8775 - DNA, 480 bp, synthetic construct
  misc_feature 1..480: note = Description of artificial sequence: synthetic polynucleotide sequence
  source 1..480: mol_type = other DNA
gaggccagctgcccaccctcttgaaagttgccatgtaaaatatctggcacaaaggtacctcgggagtcctcacttggggtagagccatcccattcagagcctggcttcattatcagttgggtgggagaactgacagcaggaaaattttctgtggcaatgcttgaatttgtcatctcacctaggtatgatttttcttgttcccactgatttgtttcttgaccttcattagttgaaacattagatgtaacacaactattttcctctgcgtgagtaaaggctgtgtccggatgatcacagactggcagcatggtgtcctgacactgctcttgggtaggtgtttcaggagtcagctcatcaccagcagcagacacaaaggtttgctctcttgagtccttttctttaatttggtctaattttacaagctggctgaacttgtcagcatctgggtctggctgccttggttgaatgttccagagttgc

SEQ ID NO: 8776 - DNA, 121 bp, synthetic construct
  misc_feature 1..121: note = Description of artificial sequence: synthetic polynucleotide sequence
  source 1..121: mol_type = other DNA
tcatgggagttcttcccattaccttccagaaagggtgactgatggttgtcactaaaaggattagtatagtgtgtttccacgggctcaatatcaccctgaactggtactccccagggactgg

SEQ ID NO: 8777 - DNA, 360 bp, synthetic construct
  misc_feature 1..360: note = Description of artificial sequence: synthetic polynucleotide sequence
  source 1..360: mol_type = other DNA
cattttggtgtactgaagaatttatctccaacacaccactggagtcagacagctccctttcaaatggactttcaattagtctcccttcctggggtgaggccttccaccactcagtgctatcagctgagaagcccagcatttccagttgagaattatcttcgttctttgggaacgaagctttgggagatatttgccatgcaacatctcctgttgtccctgtttctggagaagatctcttctccttctccactgctgtaatctgcatttcagtctccgttaatggtgagaaagtccagggatcagggctgctttgttgattgtcacagaatgggtttgacttattctcattctctgctggct

SEQ ID NO: 8778 - DNA, 121 bp, synthetic construct
  misc_feature 1..121: note = Description of artificial sequence: synthetic polynucleotide sequence
  source 1..121: mol_type = other DNA
ctgagctgtctaggtagtcataaatattttcagacttaggatcagctgtgaccaagaacttattagattcattcaatgaatcccaagctctggattcatcctcagcaacgtggcagttggc

SEQ ID NO: 8779 - DNA, 358 bp, synthetic construct
  misc_feature 1..358: note = Description of artificial sequence: synthetic polynucleotide sequence
  source 1..358: mol_type = other DNA
cacctggatctcttcctctattgactcttcaccaccgacactgtcatcatcagaacctgagcttgttgaaatgaccctggcatcctctggctgcacagttgcagaaatgtcatgttcatttttctcctggtagctagcaattagattgctttcctgatgtgtccctgaatgttcagaatatttgcctgtttcaggactggataaagaggaaaaggaatcaccatcaactgagtcattccagatctctaaaaatgtaggagttttgcgatcaaagctcttttcaaactcatttattctgtttttctctaaatccttcactttggtaactatttctacttggccatcagtggtaattagt

SEQ ID NO: 8780 - DNA, 480 bp, synthetic construct
  misc_feature 1..480: note = Description of artificial sequence: synthetic polynucleotide sequence
  source 1..480: mol_type = other DNA
tcagattcttggtgattctgttcactccagttgccttggttttcttcttgatacccagaactgggttgctggccccaggaggacagtgcaactgaagagtcatttaactcaggacttgatgcacttgaatgagtatactcactagaaatagtatctctgtcaaaatttccagacgaaccggctcctggaaggctattttcagaccccttaacgtcaagatttttggttatctcagaacatgtgctgctgacatgcacatcactgtctatagggacgtccccaaaatcaagacttcggggaactctgtgaggtggccctccacccacgttctctggctctagaaagttacattcttcagttttctcaagatccttttcaggtacagatacatattttgtgaaattcatcccatctgaagtctcagtagtttcacctgaatttctttgactcatgaggtgtttttcatgggtatcttttggc

SEQ ID NO: 8781 - DNA, 479 bp, synthetic construct
  misc_feature 1..479: note = Description of artificial sequence: synthetic polynucleotide sequence
  source 1..479: mol_type = other DNA
tgcaggttatctgcggacatccctgtttgcacatcacgggagtctagattgtaagacccctcctcatactctaaaacttcctctggttcctcggtttgaggactgaaagtgacagcaagagagctgattttgcctgatttaatgcagatttcctgatgttcagatgcaaccagagaagacagttcctggtcactctgccctttttcagaaatccctgaggcattctccacaccagaggcgatcacctcctcttcatcaaggtgccccctgtcagtggctccctgggcttccttctcactttcactttgtccatcgccatgacctttccatggatctgggtgtggaaaataccctggattctcaagcctagtcgccaaggatgctgcatcactttgcagggtttccctctctgtgtcctgcttgtcaagatgagatataagtgcctctgattcactggttccagaggctgctggcgcatc

SEQ ID NO: 8782 - DNA, 481 bp, synthetic construct
  misc_feature 1..481: note = Description of artificial sequence: synthetic polynucleotide sequence
  source 1..481: mol_type = other DNA
tggggaatgagtgtctttaacatttgctgaatggctggggatttcaggaggcaattccctttgctctgaatctgtgatatgtgaggagcctggtaacatgaatgatgacatgtctttatctctcatgacagaatcccaaatactgtttgcaattagctgcccacttttctcattcaatgtgtgatgttcactgggagcactgtccttggtatgctcatcagaggcagggagctcccaatctacctgatttgcttcctgatactccaagccccagggttccagctgtctcactgtaaatcgggtttccggctcggaaccttcagccatgtatccttctgtttgaccatcactggggattgccgcacccccactgcagtcatcccagtccaaatcattgtccatatctgagatcgttgcagtggactgagtatcctccaaaatcactctgttccacaagtcgagactgtcaggggccgtctgc

SEQ ID NO: 8783 - DNA, 479 bp, synthetic construct
  misc_feature 1..479: note = Description of artificial sequence: synthetic polynucleotide sequence
  source 1..479: mol_type = other DNA
cgggagttggtgctgctgtgcaaaagtgtgagttgtcggtttgtttcattgtacagttgcatcatgctggggtcgtcgtaactggactggctgctttccccgacgtcatcctccatggagatattcttaccatctgtgtgctctgtcttgagttcattttcatccaggttgtgagtggtatttatttcagaactgttatctgtatgaggtgaagcccacatgtctaggttcccaggacctgaactgattcgatttcgagatgactgttgcagtgactgaggaggaatgtcagtctcctctgccgtggagttaccatcttttgactcaaaaccttcctctttagcaaatggcttgtgttcagtttccttttcgtctccagcaaatgttggtgatgtgtaagagtctgaggtggaataattggtatctaagggggaaggcaccgaatcttctcctaggttggatgcactgtaatcagaaca

SEQ ID NO: 8784 - DNA, 478 bp, synthetic construct
  misc_feature 1..478: note = Description of artificial sequence: synthetic polynucleotide sequence
  source 1..478: mol_type = other DNA
tttgtaagataagaaggaatcttcccaaggaactaggacatctgaccctcctttcttcatattctcctcaaaaaggttccaggaatctaccttttcatataccttgcccctagttttaggatccactaaaccattctgatcttcttttggtggcttagaattagtccatgtgtgatccagatcagaactgggatttccaggtgcaaagatgtgatccctggagtcattgtttttcttgccccagatttctggagctgcttcattgtttatctcactgggtgaattgtccagtagttctgaagaagaaaaggcaaacccactttttgccatggcccactcattcgggtccctaacagaaggtgtcttgctgcttgttgggtgcaaattccaggtattttttaaagcttcatcatgatcttctttaccaaatgcactccaggctgggaatggcgccacagctgctggttcaccatcatct

SEQ ID NO: 8785 - DNA, 480 bp, synthetic construct
  misc_feature 1..480: note = Description of artificial sequence: synthetic polynucleotide sequence
  source 1..480: mol_type = other DNA
gtaggatttccccagggctcgggcatggctgtgggagagcgaccagaatgccacaaagaagcaaagtcttctatcaggtggtttgttccttggggagatgtatttggcaaaggtgacttctccatgggcaggttctggaacggcaagctttcctcatttttgtcttgaatatcattgctacccagttcaggctgaccaaattcagactcccagggacctgactttgtaaattcgaggctctttggttgaaatacagaatctgaggctctcctatcaatggagcttggcttatgctctttccatgattcagggctctggaaaacagattcctgttcactggaactccacgcatctgcaatatttttggagtcaatttccaaaccaccccaccagctgctgcaccgtgcatgggtctgaggtggccccatgtgacctgtgtcagttgctttttgggtcatatcttctgtatagagtgaggct

SEQ ID NO: 8786 - DNA, 481 bp, synthetic construct
  misc_feature 1..481: note = Description of artificial sequence: synthetic polynucleotide sequence
  source 1..481: mol_type = other DNA
ggttcttcagtggatggcgagctttctactaaactattcatgggtgttggtgggatcctctttccagtattttttagcctttctggggaaggggattcatctcccacaaaatctgtcaggctcaaatttctttcagagttatctctgggactgtcttgtctctggacaaactcctcatcatgttccacaaggctatctttgccagcccctgacaaaagtgaactggatgaataattagacatgttggttcccatgccatcaagtccttcaggcccagcggggagctgtccttctgacaggtcactgttggggaagaagtcatctgctggggagtagtctgcagaatgagaagattgctgggactgcccagaagccatgggtgctgggtcaaaattgaagaggtcgaagtgctcaccgtgttctccagaccatgcatgttcctccgccaccgccccttcagggatggggctgtaggagtcaa

SEQ ID NO: 8787 - DNA, 481 bp, synthetic construct
  misc_feature 1..481: note = Description of artificial sequence: synthetic polynucleotide sequence
  source 1..481: mol_type = other DNA
gccctgggagaagggtgtggtgaggcccagcaccttctcccacggggctgtcgtcactgaggaaaacagagctctccttggatgagcggctgctcctaatggtagccagtccgctgtctgggctaacaaggtctacattggcatccacctgagcctggttagaatcattgagatctggagggttctctatgaaattcacagagctgggttgtggctctatgtcagaaccatacaattccataatcccagaagacccctgggagaggggggcactgcctgccacggcttctgttgaggatgtccggctattggagaccatctctggacacctcctgttgatgacttccttgacaacgagaaccacctgatcacaagtcactgaagggtcctcttgttggtacaccaggatctcatcacagccacagtcaaagggctccagttctaggcaagggttctgacactcttccagctcacagcaaat

SEQ ID NO: 8788 - DNA, 160 bp, synthetic construct
  misc_feature 1..160: note = Description of artificial sequence: synthetic polynucleotide sequence
  source 1..160: mol_type = other DNA
cctgactgcacagctccatgttttctgagtacacagcaatctgtcgtctcggctgctgctcctctgacagatagctggagaacaggatgaggacatcaaaaccaaacttgtctgtaaatgctttcaagtcactggtaatattgctgtgaaatagacaatt

SEQ ID NO: 8789 - DNA, 121 bp, synthetic construct
  misc_feature 1..121: note = Description of artificial sequence: synthetic polynucleotide sequence
  source 1..121: mol_type = other DNA
ttcccacccttacctcaaggttcatgctcacagtactaatggccacttttatttctccatctgacagctcctttagatctttcaacattgtctgttcaatacttaaacctgtggatgacag

SEQ ID NO: 8790 - DNA, 154 bp, synthetic construct
  misc_feature 1..154: note = Description of artificial sequence: synthetic polynucleotide sequence
  source 1..154: mol_type = other DNA
ccctgagcactgaactgggtctcctgtaggacgttgatgatgtcctctcttggaggcaagttaggaaatttttcttccaggatagaaagaatttcctcctgcttctctgagatcttctctgattccatggtcatccacttgaaaagaatgctac

SEQ ID NO: 8791 - DNA, 165 bp, synthetic construct
  misc_feature 1..165: note = Description of artificial sequence: synthetic polynucleotide sequence
  source 1..165: mol_type = other DNA
cctctgaggcgatgagccagttgctcggtgatgagctcaggagcctcttggagaatctcctttagcacgagagaagaggaagactctcggaactcaacgttggcatcgctctgctcaaccggattaatgactttgacaactgctgattctaaagttttgtcttca

SEQ ID NO: 8792 - DNA, 204 bp, synthetic construct
  misc_feature 1..204: note = Description of artificial sequence: synthetic polynucleotide sequence
  source 1..204: mol_type = other DNA
cctcgccagcacactgctgccaacaagtgttatcgataacttcccttcatcatttagctgatgcaggttaatttcatcccggaatatgtggaatgattcggaaatatttagctcttctaaaataaacctcgtctcggtgaagtagttgaattcagttcttggtatgttcagcactggtaaacacagaacccctggtggactgac

SEQ ID NO: 8793 - DNA, 121 bp, synthetic construct
  misc_feature 1..121: note = Description of artificial sequence: synthetic polynucleotide sequence
  source 1..121: mol_type = other DNA
tccctcaccttgtctagaaagtaagcatatgtgaaggtagaaatgagagaatccaagtcacacgatttaggcccaataaccacatggaccttctccaagcgtttgcttcgattctgaaaca

SEQ ID NO: 8794 - DNA, 121 bp, synthetic construct
  misc_feature 1..121: note = Description of artificial sequence: synthetic polynucleotide sequence
  source 1..121: mol_type = other DNA
gtttcaggtagaaagttttatataagcacttatcaactttaatggtcttttacaagatagttacagttagaccattgtaaggatcacacttccgtctgcactctgaatggtggttcaggca

SEQ ID NO: 8795 - DNA, 121 bp, synthetic construct
  misc_feature 1..121: note = Description of artificial sequence: synthetic polynucleotide sequence
  source 1..121: mol_type = other DNA
atacgcgcgcgcgcacacacacagctttgctcactcaacttaccagtttagatttggcgcgttgcaaaaattcttccatgtcgtggctaggggtttggaacccgggtactcggaggggcgc

SEQ ID NO: 8796 - DNA, 121 bp, synthetic construct
  misc_feature 1..121: note = Description of artificial sequence: synthetic polynucleotide sequence
  source 1..121: mol_type = other DNA
gagggctggaaaaacacctgaaaagataatgactgaaaacttcacaaatttgacaagagttatagacttatagattcaacaacttaagtgaaggttaaacaggataaacccaaagaaattc

SEQ ID NO: 8797 - DNA, 121 bp, synthetic construct
  misc_feature 1..121: note = Description of artificial sequence: synthetic polynucleotide sequence
  source 1..121: mol_type = other DNA
attcatttacacactgaagcacttctgaatacaataaattatcttcataatatccttccgcaatcagaggaaaaatcagccccagtgtccactacagagactgaagacaaaggagatgtca

SEQ ID NO: 8798 - DNA, 121 bp, synthetic construct
  misc_feature 1..121: note = Description of artificial sequence: synthetic polynucleotide sequence
  source 1..121: mol_type = other DNA
ttgcctgaaagcaccgcgggcggccagggtgggctctgtactcactatttggcagagtccgacagctggtactccctcctcctgtcgtaacactcctggatgcctggatcttgccagagct

SEQ ID NO: 8799 - DNA, 121 bp, synthetic construct
  misc_feature 1..121: note = Description of artificial sequence: synthetic polynucleotide sequence
  source 1..121: mol_type = other DNA
cctcaattttcccatctgtagaatggagaggatactacctctacctcaaacatggtgagaaataaatgaaatcactgattaaagtacccagaataatgactgaatgtataaacgtcactgc

SEQ ID NO: 8800 - DNA, 121 bp, synthetic construct
  misc_feature 1..121: note = Description of artificial sequence: synthetic polynucleotide sequence
  source 1..121: mol_type = other DNA
tcttcctttgccattttggatgcatagtgtattcagtaaatggttggttgaataatggcttctctaaagatacagtctggtgacatgaaataattggtatacttctaaatagaacattacc

SEQ ID NO: 8801 - DNA, 121 bp, synthetic construct
  misc_feature 1..121: note = Description of artificial sequence: synthetic polynucleotide sequence
  source 1..121: mol_type = other DNA
atctttttgaaaagatcaatgttcacttaaccttttacctattctcaggaagtccgtaacttactgataataaattacactgcccttgtaggagcatttgcaatttcaatcaaatcaaggc

SEQ ID NO: 8802 - DNA, 121 bp, synthetic construct
  misc_feature 1..121: note = Description of artificial sequence: synthetic polynucleotide sequence
  source 1..121: mol_type = other DNA
cgcgacagcgcggcggacttcttctcccactacgagtacctgtgcgcgctgcagaactcggtgccgctgcccgccgtgcgcgcctgtctccgggagggcgtgctggatttcaacgccgacc

SEQ ID NO: 8803 - DNA, 121 bp, synthetic construct
  misc_feature 1..121: note = Description of artificial sequence: synthetic polynucleotide sequence
  source 1..121: mol_type = other DNA
ttctatttaatcaaaagagtggtaaatggatattgagcagcaaaaataactgatgtccagtacaccctatattgttttctaattgttttgtcacatgtaacatcagcccttttacgagaca

SEQ ID NO: 8804 - DNA, 121 bp, synthetic construct
  misc_feature 1..121: note = Description of artificial sequence: synthetic polynucleotide sequence
  source 1..121: mol_type = other DNA
actaatacaccaataaattatcatccattaaaacaatagcaaaaatatttcatcaaattgccttgccatccacttaataagaccctagggaagtgaatgtgacctataacagagtaggatt

SEQ ID NO: 8805 - DNA, 121 bp, synthetic construct
  misc_feature 1..121: note = Description of artificial sequence: synthetic polynucleotide sequence
  source 1..121: mol_type = other DNA
gaaattaggtcacctggtctgctaaaagatttttgcactgatctgtgaatctcttggatatgaaaagagtggcacaataaaacaaaattatttggggttattaatgtaatgttacctttat

SEQ ID NO: 8806 - DNA, 121 bp, synthetic construct
  misc_feature 1..121: note = Description of artificial sequence: synthetic polynucleotide sequence
  source 1..121: mol_type = other DNA
atttacacgtccatttggcctctgaaaaccacatcctctcctctacagcttgtctactttcttttcctgaggccaactgttaggaaatgatgttctaaggtaagaatttccttcacacagc

SEQ ID NO: 8807 - DNA, 121 bp, synthetic construct
  misc_feature 1..121: note = Description of artificial sequence: synthetic polynucleotide sequence
  source 1..121: mol_type = other DNA
agtttgcgtcaaactacgatgatgatggttattatataatattggagttatattgcacaagagaatgtttggaagaaataaatggaagagaactataaaacaggaaagggctaactcatgt

SEQ ID NO: 8808 - DNA, 121 bp, synthetic construct
  misc_feature 1..121: note = Description of artificial sequence: synthetic polynucleotide sequence
  source 1..121: mol_type = other DNA
atgggcttggggtagaccaaagtgtcaaaggagggtggggaccagaaccaccaagagaaggtcattgtgaactcagcccagaagacagaactgacgattcggtgaacaggaacaatctttg

SEQ ID NO: 8809 - DNA, 121 bp, synthetic construct
  misc_feature 1..121: note = Description of artificial sequence: synthetic polynucleotide sequence
  source 1..121: mol_type = other DNA
tctgaactagggaagtagaactggaaaggaggaatccctatgacttgacatttcattgggtgaggagtatggaaatgcataggaggaaaggccctaagacattgatgtctgcagagggaca

SEQ ID NO: 8810 - DNA, 121 bp, synthetic construct
  misc_feature 1..121: note = Description of artificial sequence: synthetic polynucleotide sequence
  source 1..121: mol_type = other DNA
gagcaaacagaacagtgaaaagaagataaaaagagttatgaaacccaaaggaattcagcattatttgaaagtatttccttctagtctttttttttctaggtaaagaatttaaaaataacat

SEQ ID NO: 8811 - DNA, 121 bp, synthetic construct
  misc_feature 1..121: note = Description of artificial sequence: synthetic polynucleotide sequence
  source 1..121: mol_type = other DNA
ttcaaagcctaatcctcaggtgagtgaacatatgagtgatgcatgacatttgatgataccgctcctagaaaggactcttctcctccataccccaaatccaccccactctatttggatgagt

SEQ ID NO: 8812 - DNA, 121 bp, synthetic construct
  misc_feature 1..121: note = Description of artificial sequence: synthetic polynucleotide sequence
  source 1..121: mol_type = other DNA
gtgtaattattttaaatgtctccatcttttatgagtagaggtgaatccctcactgtgcagtgctcctagtttatcacccacagggtcatgagcacaattaatagttgatgttttatactac

SEQ ID NO: 8813 - DNA, 121 bp, synthetic construct
  misc_feature 1..121: note = Description of artificial sequence: synthetic polynucleotide sequence
  source 1..121: mol_type = other DNA
gtaagtcacatggcaacaagcaggtcatacaatcctcttattggatcagggtgcaggtaattgaaataaatataaaatctactatagcctcatacaagaaaaagattattcttcatcccaa

SEQ ID NO: 8814 - DNA, 121 bp, synthetic construct
  misc_feature 1..121: note = Description of artificial sequence: synthetic polynucleotide sequence
  source 1..121: mol_type = other DNA
tctccttcaatgtgtagcataatcaaatacaataaccatgaggaatacaccatataatgatatcaacagtgtgaagaaatttattccattttatctgtttttcatagaaatgtaacattct

SEQ ID NO: 8815 - DNA, 121 bp, synthetic construct
  misc_feature 1..121: note = Description of artificial sequence: synthetic polynucleotide sequence
  source 1..121: mol_type = other DNA
gccattgagcctgtagcatttcaagaaccacaaaggaaaaatgaatcattcctatataccctcaaaccacagtttcatatctagcaataatttttatagcacttgggatttgttaatagct

SEQ ID NO: 8816 - DNA, 121 bp, synthetic construct
  misc_feature 1..121: note = Description of artificial sequence: synthetic polynucleotide sequence
  source 1..121: mol_type = other DNA
gatgcatgttttgcaaatattttctcccattctgtaggttttctgttcattctattgatcgttccctctactatgcaaaagtttctggttcgatgcaatccatttgtccattttttattct

SEQ ID NO: 8817 - DNA, 121 bp, synthetic construct
  misc_feature 1..121: note = Description of artificial sequence: synthetic polynucleotide sequence
  source 1..121: mol_type = other DNA
ctatggtgatctgtgatcagtgatttttgatgttactgttataattgtttcagagtgccgtgaaccctgcccatataagacagagaattaattgataaatatgtatgttctgactgctctg

SEQ ID NO: 8818 - DNA, 121 bp, synthetic construct
  misc_feature 1..121: note = Description of artificial sequence: synthetic polynucleotide sequence
  source 1..121: mol_type = other DNA
ctgatggccagggcgtagcaggcgggggccgaggacgtcagctccgccttgatgcgcggggttggagccgccaggtcccaaatggacaaagtactggcttcccctcccactatgagagtgc

SEQ ID NO: 8819 - DNA, 121 bp, synthetic construct
  misc_feature 1..121: note = Description of artificial sequence: synthetic polynucleotide sequence
  source 1..121: mol_type = other DNA
ctgccataagcgaagataacctacttaaaaagaaatagcctgaaaatgtttgccgacctcctgactaaagttcattgctttgagcatgagagttcattgcataatctcatcttcaggcggg

SEQ ID NO: 8820 - DNA, 121 bp, synthetic construct
  misc_feature 1..121: note = Description of artificial sequence: synthetic polynucleotide sequence
  source 1..121: mol_type = other DNA
gacagatcatagacaaggacagacagccccagaaagttgaggcatttaaggggaagatactgtgtcaaagccatccccaatccatgccccacaggaagcctgtgccacatccaaaccccac

SEQ ID NO: 8821 - DNA, 121 bp, synthetic construct
  misc_feature 1..121: note = Description of artificial sequence: synthetic polynucleotide sequence
  source 1..121: mol_type = other DNA
gaatatttgaaaagcattagctccattaggacatagagtctgacttttctcactgttatatttccagcacacagcactgtcttgtagttagcactcagtaaatatttatggcatggatagg

SEQ ID NO: 8822 - DNA, 121 bp, synthetic construct
  misc_feature 1..121: note = Description of artificial sequence: synthetic polynucleotide sequence
  source 1..121: mol_type = other DNA
ccttgcccagagtgacaacagtagaaaatgtctttctaacctcagagtaacagtcaaaggtagctaagatttcataatctcccaacatgatgacaaaaaacacacaggtaaaagcatgctt

SEQ ID NO: 8823 - DNA, 121 bp, synthetic construct
  misc_feature 1..121: note = Description of artificial sequence: synthetic polynucleotide sequence
  source 1..121: mol_type = other DNA
aaatatcatagaaacttggaagaaagtgtgtattgttagaaaaacaatctcttacaaagatacatgggaaactcctttaataaaacagatgccatgctcttttcactaattttatttttag

SEQ ID NO: 8824 - DNA, 121 bp, synthetic construct
  misc_feature 1..121: note = Description of artificial sequence: synthetic polynucleotide sequence
  source 1..121: mol_type = other DNA
cagggcttggattctactcacggttcactctgtatgactctctgagagtcaatttcaccatgtataaaagaggattatttattcctacattttagggtagttgtgaggattaaatataata

SEQ ID NO: 8825 - DNA, 121 bp, synthetic construct
  misc_feature 1..121: note = Description of artificial sequence: synthetic polynucleotide sequence
  source 1..121: mol_type = other DNA
cattgataaatcataaatttgttttttcaatgcagccacatcttccttttgacttacgcgttttgattgttcttcgagctgaaagaccaaataaaagttgtgtgcttacaaactcactttg

SEQ ID NO: 8826 - DNA, 121 bp, synthetic construct
  misc_feature 1..121: note = Description of artificial sequence: synthetic polynucleotide sequence
  source 1..121: mol_type = other DNA
aggagcctggaaaaactcttgaccagtgggttcacccgaatatggccagtcagaatgtcatagctccacgacaaagcacggcgagcctccttcagctcctcttcttcagcaatcaaaaagg

SEQ ID NO: 8827 - DNA, 121 bp, synthetic construct
  misc_feature 1..121: note = Description of artificial sequence: synthetic polynucleotide sequence
  source 1..121: mol_type = other DNA
atttgtgaacatgatataactgtttctctacaaacaaacaatacctggagaagtcacgttgtgtctgggtttttgtttttgtttttttcaggaccggattccatggctctgtaacttgcat

SEQ ID NO: 8828 - DNA, 121 bp, synthetic construct
  misc_feature 1..121: note = Description of artificial sequence: synthetic polynucleotide sequence
  source 1..121: mol_type = other DNA
ggaataccatgatccatcttcagctgcctccatatttttatgaacttgacaaatgctgattgtaaaaattgcatgtgatctgctggagtgctcattcatttgagtggtacctgtatgtctg

SEQ ID NO: 8829 - DNA, 121 bp, synthetic construct
  misc_feature 1..121: note = Description of artificial sequence: synthetic polynucleotide sequence
  source 1..121: mol_type = other DNA
cagctgtgggtagtcaaacatgtttccaaaccaggacagggctgaattcataaaagacagcagggccaggaaggcaatcagattcacagcgatgttggccaccagggagatggaggaggat

SEQ ID NO: 8830 - DNA, 121 bp, synthetic construct
  misc_feature 1..121: note = Description of artificial sequence: synthetic polynucleotide sequence
  source 1..121: mol_type = other DNA
aaggaatttcaggccttgtagccaatcatggcttaggatgcaggggttgcagatgcatcgatctgaccaccttcctgtggtttctctccagcctggctctttggggctgagaactgctgcc

SEQ ID NO: 8831 - DNA, 121 bp, synthetic construct
  misc_feature 1..121: note = Description of artificial sequence: synthetic polynucleotide sequence
  source 1..121: mol_type = other DNA
ttttaagataagaattgaagcaggttcatgttcctcccatcttagaaaagtttttctttagtgtgattccctccctctccttctgctcctgactaaagtacctctcccttcaaagccagat

SEQ ID NO: 8832 - DNA, 121 bp, synthetic construct
  misc_feature 1..121: note = Description of artificial sequence: synthetic polynucleotide sequence
  source 1..121: mol_type = other DNA
ggagaaattgcagggtgagtgatgtccaacctcagtatggcttttttctgcagctaccatgggggcttaagttcttcccagctgtcttagggcaagtagtgaatttctttctggaaaactc

SEQ ID NO: 8833 - DNA, 121 bp, synthetic construct
  misc_feature 1..121: note = Description of artificial sequence: synthetic polynucleotide sequence
  source 1..121: mol_type = other DNA
atgattaagtactttccaaagttgcaaagtaaataagtagagaagttgtgatttgaaccggagcaatgtgtctccagagctactttttaatcgttttgttagaggcaaccccaatgtcaag

SEQ ID NO: 8834 - DNA, 121 bp, synthetic construct
  misc_feature 1..121: note = Description of artificial sequence: synthetic polynucleotide sequence
  source 1..121: mol_type = other DNA
agggcgtgccccaagccaaaggtatattctataggaaactgcacacatccttgcacctcagaagatccatttgcagtcaaagtcgctttcagaagcttggagggagagatctggggttgga

SEQ ID NO: 8835 - DNA, 121 bp, synthetic construct
  misc_feature 1..121: note = Description of artificial sequence: synthetic polynucleotide sequence
  source 1..121: mol_type = other DNA
cagtttctttaacataataaatagaattctcagaaaaatagtatctagtatttctagtatttaaaaacttacttgattttagcaatgcagcaagagtgtctaaagcaaccctgtcaacaca

SEQ ID NO: 8836 - DNA, 121 bp, synthetic construct
  misc_feature 1..121: note = Description of artificial sequence: synthetic polynucleotide sequence
  source 1..121: mol_type = other DNA
tttgatttctctgctcataaatattttcctgttgtgaaacttgtttgagagagactggggaggtggccataaaggggcagagtcttctttcagacccaactcttagagggcacatcaccag

SEQ ID NO: 8837 - DNA, 121 bp, synthetic construct
  misc_feature 1..121: note = Description of artificial sequence: synthetic polynucleotide sequence
  source 1..121: mol_type = other DNA
agtgagctatggttgcaccactgcactccagcctgggtgacagagtaggacttcatctctgtcttaaaaaaaaaaaaagccaaaggttctaagtctggattaaaaaatctccaacaggctg

SEQ ID NO: 8838 - DNA, 121 bp, synthetic construct
  misc_feature 1..121: note = Description of artificial sequence: synthetic polynucleotide sequence
  source 1..121: mol_type = other DNA
ggccaagtcttgactagtgactgggccctggtctggtattcattcgttccatcatccaagtgatatttatggaaaaactactaagtgtgagactatgaataggggttactgcagtgaacat

SEQ ID NO: 8839 - DNA, 121 bp, synthetic construct
  misc_feature 1..121: note = Description of artificial sequence: synthetic polynucleotide sequence
  source 1..121: mol_type = other DNA
attaaggatttaatcttgtgttgactttgcaaatattttcttctaggccgtgaactctcttttaattttcgtttatgtgttttaaacttttgtgtagtcattgtgtccatctcttctcaca

SEQ ID NO: 8840 - DNA, 121 bp, synthetic construct
  misc_feature 1..121: note = Description of artificial sequence: synthetic polynucleotide sequence
  source 1..121: mol_type = other DNA
ttcaggatcggagtagactgagtcttttactgagtactgtcaaaagaaaatgatttaagtgactcaagcagaggttgggtctaaatagagtctctatttagagactaaataggttctaaag

SEQ ID NO: 8841 - DNA, 121 bp, synthetic construct
  misc_feature 1..121: note = Description of artificial sequence: synthetic polynucleotide sequence
  source 1..121: mol_type = other DNA
aatttctttgtagggtgataaaaatgtcctacaatgagacacaggtgatggctgtacaactttgtggatatattaaacaacaatgaattatgtattttaaaatagtgtatattaattacat

SEQ ID NO: 8842 - DNA, 121 bp, synthetic construct
  misc_feature 1..121: note = Description of artificial sequence: synthetic polynucleotide sequence
  source 1..121: mol_type = other DNA
ctttctgtgatacagtttcacatcaaccactggtgcctgtaaccccatgacccttatcattacagagcagcagttttgttctgtctcatgaacactggaacagaagcccagaggactggac

SEQ ID NO: 8843 - DNA, 121 bp, synthetic construct
  misc_feature 1..121: note = Description of artificial sequence: synthetic polynucleotide sequence
  source 1..121: mol_type = other DNA
acgaagacacaaaaaccaaacaatgaaaatattgtcccttcctctggtttaaatatgtcatttccataagaccagatcaagtcgctgttggacaactttttaaaagatagcaacagtttaa

SEQ ID NO: 8844 - DNA, 121 bp, synthetic construct
  misc_feature 1..121: note = Description of artificial sequence: synthetic polynucleotide sequence
  source 1..121: mol_type = other DNA
acagcctctgccaggggctaccacgacatcgtggagtgtctggccgaacatggagccgaccttaatgcttgcgacaaggtgccttatgggggaagactcatatgcactgggaagtgatcta

SEQ ID NO: 8845 - DNA, 121 bp, synthetic construct
  misc_feature 1..121: note = Description of artificial sequence: synthetic polynucleotide sequence
  source 1..121: mol_type = other DNA
cctggggcctctccacctactcacatggcaaatcccagccacggcatcttcccgaccacacctcagaggcttccttctggggagaccccacacccaagcacatggaggtaggtggctgcac

SEQ ID NO: 8846 - DNA, 121 bp, synthetic construct
  misc_feature 1..121: note = Description of artificial sequence: synthetic polynucleotide sequence
  source 1..121: mol_type = other DNA
gggaaccccaccctgaagccagtcagtctgaagttccagaggcctggacttgaaattgatgggaaggaggagagggggcttgtgggattgagccctcaacctgtgggatctgatgctatct

SEQ ID NO: 8847 - DNA, 121 bp, synthetic construct
  misc_feature 1..121: note = Description of artificial sequence: synthetic polynucleotide sequence
  source 1..121: mol_type = other DNA
taactaagcctttgatggctaggcagtcaaatttgaaagtaaagtgaaaaaatgccctcagccaagtttgcagggaatgctttgtgattctagcaaggtgggtctctagtgaggctggacc

SEQ ID NO: 8848 - DNA, 121 bp, synthetic construct
  misc_feature 1..121: note = Description of artificial sequence: synthetic polynucleotide sequence
  source 1..121: mol_type = other DNA
gtcttaaaactaacgatgacatctggactttggactagaaacgtcaagctgatgaagtcgtttgttcttgtgtgcttctgtgatgatccatggaggagcttaagtctaaagattgccattt

SEQ ID NO: 8849 - DNA, 121 bp, synthetic construct
  misc_feature 1..121: note = Description of artificial sequence: synthetic polynucleotide sequence
  source 1..121: mol_type = other DNA
ttcccaggtgtagaataaagactcctccctcctacccagagatggctgcataattaacttgtcctttacaccctttttttcctttaaacattcagcttctcttatgtgaaatgtagattaa

SEQ ID NO: 8850 - DNA, 121 bp, synthetic construct
  misc_feature 1..121: note = Description of artificial sequence: synthetic polynucleotide sequence
  source 1..121: mol_type = other DNA
gaataatttggagtgtagaattctaatatccacagcagatattaaataagtatgattacagagtgaagacatttcaggcatgcaagaactcaaaatgtttacttcttattcagtctttcct

SEQ ID NO: 8851 - DNA, 121 bp, synthetic construct
  misc_feature 1..121: note = Description of artificial sequence: synthetic polynucleotide sequence
  source 1..121: mol_type = other DNA
caaaagaaaagaaaaccagagacaaacagaaacccactcatgtcaaagaggtctttccttgggctgctctcagcactgctgaccgcagccggccaggcctgtggtgggatctgctgagtgt

SEQ ID NO: 8852 - DNA, 121 bp, synthetic construct
  misc_feature 1..121: note = Description of artificial sequence: synthetic polynucleotide sequence
  source 1..121: mol_type = other DNA
ggtgctctgcatgtacttcccgtgggagaagacctcctcggctgtggacaggttgtaggcgcacactgccgacagccccacgttgttcctggggaggggaaagaggtgacgggaccacctg

SEQ ID NO: 8853 - DNA, 121 bp, synthetic construct
  misc_feature 1..121: note = Description of artificial sequence: synthetic polynucleotide sequence
  source 1..121: mol_type = other DNA
tttttcagcctcagaggctggctagcagtggggtgcaagccctgtccctgatatggagactttagctgtcccttctctgtcagtccatgtacgtgacatgcagtcctctccccaccggact

SEQ ID NO: 8854 - DNA, 121 bp, synthetic construct
  misc_feature 1..121: note = Description of artificial sequence: synthetic polynucleotide sequence
  source 1..121: mol_type = other DNA
gctgggagaatgcaggatgccagggccagaggggaacagagtcaggcctgctgtacctcgctggatccatggactgtcactcagggattctggatccaaggccagaaagcctagatttgac

SEQ ID NO: 8855 - DNA, 121 bp, synthetic construct
  misc_feature 1..121: note = Description of artificial sequence: synthetic polynucleotide sequence
  source 1..121: mol_type = other DNA
taaaaggcttgttatacctataaacagtgataacaacatatttatacatgggaataagacttaaaaacagacacaaacgggccaatcaacagtatcatggaacaatgtgtactttacaaca

SEQ ID NO: 8856 - DNA, 121 bp, synthetic construct
  misc_feature 1..121: note = Description of artificial sequence: synthetic polynucleotide sequence
  source 1..121: mol_type = other DNA
attagtgcatatcttcatacacacaaaatgtccaaatctgttcatagcagttttatttatgatagctgaaaaccagaaacaatatgaatgtctatttatattagaatggataaattagttg

SEQ ID NO: 8857 - DNA, 121 bp, synthetic construct
  misc_feature 1..121: note = Description of artificial sequence: synthetic polynucleotide sequence
  source 1..121: mol_type = other DNA
gagagagattctgtctcagaaaaaaaaaaaaggaaggaaagaaggaagactacttattagacattccatttatatgaaatatctataacagtcaaatttatatataaagaaagcagatcag

SEQ ID NO: 8858 - DNA, 121 bp, synthetic construct
  misc_feature 1..121: note = Description of artificial sequence: synthetic polynucleotide sequence
  source 1..121: mol_type = other DNA
tgaaaccaggacatctgccccagggggcgttcatacaggaaagcgctctggtctattgtacttggctgtgtttgtaacggttgcatctctaaagcctcatagacaccaataaagtgaaaga

SEQ ID NO: 8859 - DNA, 121 bp, synthetic construct
  misc_feature 1..121: note = Description of artificial sequence: synthetic polynucleotide sequence
  source 1..121: mol_type = other DNA
gaggcagaagattacctggtccaggggggcatgagtgatgggctttatttgctgcgccagagccgcaactacctgggtggcttcgccctgtccgtggcccacgggaggaaggcacaccact

SEQ ID NO: 8860 - DNA, 121 bp, synthetic construct
  misc_feature 1..121: note = Description of artificial sequence: synthetic polynucleotide sequence
  source 1..121: mol_type = other DNA
cctgactccctatgtccccacccatatatattactgccaacttttactttttccaatctacttgctatttcaaattttcatcttcctgattaccagtgacagcgagcagattttcacgttt

SEQ ID NO: 8861 - DNA, 121 bp, synthetic construct
  misc_feature 1..121: note = Description of artificial sequence: synthetic polynucleotide sequence
  source 1..121: mol_type = other DNA
cttcggcatgctgaaagaagaacttaatagtgcttaccaatatcgttaatcactgctcttattttggagacaaaaggaccaacttcactggaactcattttggctctttccttaaggtcag

SEQ ID NO: 8862 - DNA, 121 bp, synthetic construct
  misc_feature 1..121: note = Description of artificial sequence: synthetic polynucleotide sequence
  source 1..121: mol_type = other DNA
gtagaagttgggcaggtaggccccataggccggcaccggctggtagccgttgacggggacgtagagctgcggcgggggcaccatgggtctgatctggcccttcatggggatgaactggggc

SEQ ID NO: 8863 - DNA, 121 bp, synthetic construct
  misc_feature 1..121: note = Description of artificial sequence: synthetic polynucleotide sequence
  source 1..121: mol_type = other DNA
ctttttaaaattcacatctaaaccataacaggaccacaaatattacattttttctttagcagtaatcaataactcatcatttatttcaagttgacgcactgactttaatattttaaccctc

SEQ ID NO: 8864 - DNA, 121 bp, synthetic construct
  misc_feature 1..121: note = Description of artificial sequence: synthetic polynucleotide sequence
  source 1..121: mol_type = other DNA
acttcaatgcccagcaccccacagtctgcctgctgtggggaggcacataccttgtggctttgcattcaggagctgtaggttgatatactgacaaagaagagtactagaactgttgatcaga

SEQ ID NO: 8865 - DNA, 121 bp, synthetic construct
  misc_feature 1..121: note = Description of artificial sequence: synthetic polynucleotide sequence
  source 1..121: mol_type = other DNA
gagcatgtatttaccttgaatgcttttggacctatgcctgaagaagtgatattatttttactcagatcaagcctttccaaatttggtaatccattaaatgcttcatctgggatggaggcga

SEQ ID NO: 8866 - DNA, 121 bp, synthetic construct
  misc_feature 1..121: note = Description of artificial sequence: synthetic polynucleotide sequence
  source 1..121: mol_type = other DNA
tatttggaggaaacttcagaaaccgcagcacgacgcagcgctgttggaaaataaaacaaatctgattagtatttgctcaaagccaaggcacaaggtgtcagtcagtttgggggtcccatcc

SEQ ID NO: 8867 - DNA, 121 bp, synthetic construct
  misc_feature 1..121: note = Description of artificial sequence: synthetic polynucleotide sequence
  source 1..121: mol_type = other DNA
acgggagagctgagtggtagcttaaagatccccaaccgggacagcgggatcgacagtccctcctccagtgtggctggagagaactttccctgcgaggagggcttggaggctggcccaagcc

SEQ ID NO: 8868 - DNA, 121 bp, synthetic construct
  misc_feature 1..121: note = Description of artificial sequence: synthetic polynucleotide sequence
  source 1..121: mol_type = other DNA
cgatgatgaacaccaggcccgtggccaggttgttgaggaagtccagcttggcgtgcttggccgggttgttaaggtcgtacttgactgtgggcgagagaggagtggatggtgccaagggcag

SEQ ID NO: 8869 - DNA, 121 bp, synthetic construct
  misc_feature 1..121: note = Description of artificial sequence: synthetic polynucleotide sequence
  source 1..121: mol_type = other DNA
cgggaatcgacggcctccctccggccctcccagacctgccgaccgcgactgtgcctcccgtgccaccacctcagtatttctctccagccgtgatcttgccgagcctcgctgccccactccc

SEQ ID NO: 8870 - DNA, 121 bp, synthetic construct
  misc_feature 1..121: note = Description of artificial sequence: synthetic polynucleotide sequence
  source 1..121: mol_type = other DNA
tctccagctgtccctgttcggggtccgcggccgcgtggggacacttgagggctgggagagagccccggaccagaattcggaggcgacagtgtcatcatccccaatatccttagtttttccc

SEQ ID NO: 8871 - DNA, 121 bp, synthetic construct
  misc_feature 1..121: note = Description of artificial sequence: synthetic polynucleotide sequence
  source 1..121: mol_type = other DNA
gtggcccgtgtgccaggaagtcagctcacgctgggctacatggaggagcacggcttcaccgagcccatcctcgtccctaagaaagacgggctgggtctggctgtcccggcccccacgttct

SEQ ID NO: 8872 - DNA, 121 bp, synthetic construct
  misc_feature 1..121: note = Description of artificial sequence: synthetic polynucleotide sequence
  source 1..121: mol_type = other DNA
accgtataccgccctcagtcctcgcggctcctgtcgctgggctcgcccggcacctccgccggtttctctgcatccttggcgcgctcctgctcagtaagctgctcgctcgttggaattgagt

SEQ ID NO: 8873 - DNA, 121 bp, synthetic construct
  misc_feature 1..121: note = Description of artificial sequence: synthetic polynucleotide sequence
  source 1..121: mol_type = other DNA
tctgtttcttaactgcagctcagacaccaagttcttggctcttgcataaacagcaggccgaacaaatgtttctcaggcaaggtttaataggcttgagctggagcaaaagcaagggagcggc

SEQ ID NO: 8874 - DNA, 121 bp, synthetic construct
  misc_feature 1..121: note = Description of artificial sequence: synthetic polynucleotide sequence
  source 1..121: mol_type = other DNA
cttactggggggaacttcttcctctggatgtactcagtgacggcagggtcaaagtccctggcgtagccctcgttaaggctgtagattttacctttcttttttatcttcacatccttgtcca

SEQ ID NO: 8875 - DNA, 121 bp, synthetic construct
  misc_feature 1..121: note = Description of artificial sequence: synthetic polynucleotide sequence
  source 1..121: mol_type = other DNA
tctcatgggttggaggagtagaatgaaggccaggatggtggcaggtcagtgaggtcttaaaatggctttccttagccccgttcttagtgagcttgggtgccaggagcaagtgagtcactaa

SEQ ID NO: 8876 - DNA, 121 bp, synthetic construct
  misc_feature 1..121: note = Description of artificial sequence: synthetic polynucleotide sequence
  source 1..121: mol_type = other DNA
aaataaaacataactttgaagtttgggaggtaagtgacttgtgtaaggttttaggttacatgagctaaagataagaatttctgtagtgtcatttcctaattgttcagagtgcccattatgc

SEQ ID NO: 8877 - DNA, 121 bp, synthetic construct
  misc_feature 1..121: note = Description of artificial sequence: synthetic polynucleotide sequence
  source 1..121: mol_type = other DNA
tgcaaagtccctggcgtgtctcagaatcatagaatcacagattctagagctaaaaagcccgagagtgagcctgcctttaagtgtgctggtggcaacacatttttcaagtggctttacggac

SEQ ID NO: 8878 - DNA, 210 bp, synthetic construct
  misc_feature 1..210: note = Description of artificial sequence: synthetic polynucleotide sequence
  source 1..210: mol_type = other DNA
ctcagttggagctgcttccccggggcctctcctcgcattccacgtcctgcagctcaatgacttccaccttcgaatccctcctctcacaccggacgtggaaaggcacgtgggggtcctcaaacaggccgtggtcagtctcagggtagcctgggcagagtccccctcgggggttccgcccaggcccagggacaggcggcgggtgcacggcga

SEQ ID NO: 8879 - DNA, 331 bp, synthetic construct
  misc_feature 1..331: note = Description of artificial sequence: synthetic polynucleotide sequence
  source 1..331: mol_type = other DNA
cagtcacggaggcagaagccgtcacagtggtgatgggctggcagtagccgggcacggagctgcccatggcagtggacgctgggttccgagggttgtgagaacgggccccgcgagggccccagcgggccctattgctagggccagaatgcccttcagtagaaatttcaaaagcgtctctgcgcggtctgtaggggggtggccacaagccttctctgggggggtccctgcggggctgctggccttgccgtccgggaggcagggaccctgagtccaggtggggctgctgtctcgggttcgagggtgggtgatgcctggattcgggatggaccac

SEQ ID NO: 8880 - DNA, 256 bp, synthetic construct
  misc_feature 1..256: note = Description of artificial sequence: synthetic polynucleotide sequence
  source 1..256: mol_type = other DNA
cagtggagtgggcgaagacggggttttctgtggcttccacgatcacttggtgggcagggcctcccgcgccctgctgggcctcgtagtgccgaagctcctcgctgaggcctgacactgtcgtctgggaactatactccgagtcggaggaatcagacccgctgtgcgtgtggccgggcggcatggcgaagcggaccacgctggggggtggctcaggggagggtgtgggcaggcggttcaagccgttggctggagacac

SEQ ID NO: 8881 - DNA, 121 bp, synthetic construct
  misc_feature 1..121: note = Description of artificial sequence: synthetic polynucleotide sequence
  source 1..121: mol_type = other DNA
tcactactgacctcaggatatggtccaaagaaagacaaaagcacgggaagcaaaaccagcccattgagaacgccgaggatggtgaggatcgccagcacagcaaagaaatacctgggagatc

SEQ ID NO: 8882 - DNA, 144 bp, synthetic construct
  misc_feature 1..144: note = Description of artificial sequence: synthetic polynucleotide sequence
  source 1..144: mol_type = other DNA
cctgacaatgaagtcgaactcagatcccgccagcatcagcactcccagcagagtggacacggcgccatccaggacgggtgcaaacatgtgctccagggcaagcacagccctgcggttcttgtcgccgatggccgtcagaaaggc

SEQ ID NO: 8883 - DNA, 139 bp, synthetic construct
  misc_feature 1..139: note = Description of artificial sequence: synthetic polynucleotide sequence
  source 1..139: mol_type = other DNA
ccaaagcaacgtgaacggtgaactccactcctatgccaacagaagcgatcaggatgaccacgggcacggcactgagcttgattccgatgaggcccatcatgccgaacagctcgaccgtcatcagcgccaggaccatcac

SEQ ID NO: 8884 - DNA, 282 bp, synthetic construct
  misc_feature 1..282: note = Description of artificial sequence: synthetic polynucleotide sequence
  source 1..282: mol_type = other DNA
caatgatcccggccgtccaggggttcagaaggaagacagcgcacacgaggaatgtgcaggccaacaccacgctgatgaacagcagcagccagtggcggaggccgatgtactgctcccagaagaggaaggggtagccgttggggtaactggacagccccaggctcgtatagttgctgcagatggtccttactttttcaattgcctccacaaagtctgaggtgtcccgcaagccgttgaggtagaaagggaactgggcatactcgatgggctctgctgccggga

SEQ ID NO: 8885 - DNA, 185 bp, synthetic construct
  misc_feature 1..185: note = Description of artificial sequence: synthetic polynucleotide sequence
  source 1..185: mol_type = other DNA
cttctcagccttgtttcaggcatgtagtcggctttgtcgtggacccattctggtcggtgtggccggatgttggcctgggaggcagcatacgcgacggggtcgttgctgacccaagccgtcaggtagatgtagaaagcgctgggattaatgatgccatctgcatccaccagacgctgtttagtcaa

SEQ ID NO: 8886 - DNA, 144 bp, synthetic construct
  misc_feature 1..144: note = Description of artificial sequence: synthetic polynucleotide sequence
  source 1..144: mol_type = other DNA
cctggctgatgtcgatgggcttatcgcggctgccggtttgcaccaggagtttgtaggcaaggactccatcgtctgatccattcttgtaattgtttggcatgattttcccggtttcccagtcactgtcaaatgcatcctgaagtc

SEQ ID NO: 8887 - DNA, 311 bp, synthetic construct
  misc_feature 1..311: note = Description of artificial sequence: synthetic polynucleotide sequence
  source 1..311: mol_type = other DNA
ccctgaagccagtctctgaagtagtgcagccacattttgggaagctgtttgttttcttccaacatgacatacttcacgttactgaaactcctgtgtaggtcgtaaagtaagtgctggatattcgggtagtctgctttctgggtgactatatacatgttgtagaaagaaaagtatttgaattgtgcagcaataaagtcatattctctggtttcccgaggtacaatgtccgtaaggtccagcccgtctctcactcgggtggtgccataaaggctgacccccagcaagcccagaaaaaggaagatcaccactac

SEQ ID NO: 8888 - DNA, 404 bp, synthetic construct
  misc_feature 1..404: note = Description of artificial sequence: synthetic polynucleotide sequence
  source 1..404: mol_type = other DNA
ccttggcttttggtttcaagaggaaaggagcatagtgcttctcagcaaaagatgagagtgtccacttcgtacaggggggctcgaggcagtggaggctggagtcggagaactgggagagcaggtcccttgtggagctggtgctctctgggctctggcagctgagggtgtcctgtgtcacggtgacgggctgcacagagatctcggagcgcggctcagcggtggtgtagtacacgtgcgtgtgggggtcgtactccgtgcggagctggacagtggactgcatggtaatctgcgtttcatgggcaaagctgtggctgctgtagggaggtggggggctgtagcgggtattgtcgtgtgtgtcggtgtaggcctgaggttcaacctgaatcactctgctgacgcagggg

SEQ ID NO: 8889 - DNA, 121 bp, synthetic construct
  misc_feature 1..121: note = Description of artificial sequence: synthetic polynucleotide sequence
  source 1..121: mol_type = other DNA
ccttgtaaaacagcagaaaatatccagtctcctgtcctcgcgtcgatataaatccatgctgagaattgcaggaaaaatgagcagaaccatggcaaaattgaacaccactactaccgctgcc

SEQ ID NO: 8890 - DNA, 121 bp, synthetic construct
  misc_feature 1..121: note = Description of artificial sequence: synthetic polynucleotide sequence
  source 1..121: mol_type = other DNA
ggagggagaacgcccgcagagcgggaattgggattaacgcggccatgaagaaggctgtgacattgctgatggacgtgagggccacgctggctcctgtgcgcttcaggcactccccggtcct

SEQ ID NO: 8891 - DNA, 121 bp, synthetic construct
  misc_feature 1..121: note = Description of artificial sequence: synthetic polynucleotide sequence
  source 1..121: mol_type = other DNA
ttttgcattacctcaaaagggattcttttattctgtcctgtttcactgaaggcgtgggccagaagaaaaacatcatccacaccaacaccaagagcgagaaatggcaaaacctacagcaaaa

SEQ ID NO: 8892 - DNA, 157 bp, synthetic construct
  misc_feature 1..157: note = Description of artificial sequence: synthetic polynucleotide sequence
  source 1..157: mol_type = other DNA
cctgagttgttgcagcgttaaaggaaattccgatcaatgagcacaggcccagtcctgcagccactgacagtgcaaccagcaggacgccagccagccccacggcaccctgggacttggagcagtcccagcgcagcatggttagacaggcataggcgag

SEQ ID NO: 8893 - DNA, 133 bp, synthetic construct
  misc_feature 1..133: note = Description of artificial sequence: synthetic polynucleotide sequence
  source 1..133: mol_type = other DNA
ccatgagtaagtagccgctggccacgcggatgacactgacgtcagagaaggatttcaggatgtcgtccagggtcgtggtggtgaaggaaagcaccttttgagtggagttctgtgcgacactctgatgaaccac

SEQ ID NO: 8894 - DNA, 149 bp, synthetic construct
  misc_feature 1..149: note = Description of artificial sequence: synthetic polynucleotide sequence
  source 1..149: mol_type = other DNA
cctccacatatgtcctctgccaggcctccaggatggctgccgctttgtcctcgttccagttgatgtgtgagacatactcgtaccccttgaagtgctcgtacatttgcttgggagtcattaactggaacatggtctgcagggcatgggcg

SEQ ID NO: 8895 - DNA, 121 bp, synthetic construct
  misc_feature 1..121: note = Description of artificial sequence: synthetic polynucleotide sequence
  source 1..121: mol_type = other DNA
ctgacgagttttccagtgctgttcttgactgtgccacccacaatcaactcctcctgccagtgcatatactttctggataagccatgacatccaccattcaaaacaagggccatatcaagag

SEQ ID NO: 8896 - DNA, 200 bp, synthetic construct
  misc_feature 1..200: note = Description of artificial sequence: synthetic polynucleotide sequence
  source 1..200: mol_type = other DNA
ctttggttgaatttttgttgggggctgtggcggggcagtctggatcggccggattgaggcaggggcggtccatgtaaccatgaccaacctcagccttattcagcatttcctcccagctgtccacttgatagtttattttctttaactcttccaggaattccaaagggtcgaagtttgtccaccgcaaaggaggtttacct

SEQ ID NO: 8897 - DNA, 121 bp, synthetic construct
  misc_feature 1..121: note = Description of artificial sequence: synthetic polynucleotide sequence
  source 1..121: mol_type = other DNA
catgatcacacacttacaggaggtatgctgtcccagactgtaatttcgccccttcccagaagcagtccaaaggtgtaataatcaaacaagggtaaagatattctattatctgtcaaagtta

SEQ ID NO: 8898 - DNA, 121 bp, synthetic construct
  misc_feature 1..121: note = Description of artificial sequence: synthetic polynucleotide sequence
  source 1..121: mol_type = other DNA
tttttgccaacaagaagaaaatatacctgatccatgtaacctgtttctgtgataagctctcctgatttgtaacacaaatgttccaatttccactgcctaataaaatgaaaagcagagacaa

SEQ ID NO: 8899 - DNA, 191 bp, synthetic construct
  misc_feature 1..191: note = Description of artificial sequence: synthetic polynucleotide sequence
  source 1..191: mol_type = other DNA
cctgttgtacatgtatacatggacacggctggcctggagtgccgagtccaggtgttgtaggagcgcttctgtggtcaggacattagcaccttcttctttaggggtctgtatcatgagttgaggattaaacatagcctcttctccaatcttctggcgagtataatttaattcacgacttactcgtcctccaa

SEQ ID NO: 8900 - DNA, 194 bp, synthetic construct
  misc_feature 1..194: note = Description of artificial sequence: synthetic polynucleotide sequence
  source 1..194: mol_type = other DNA
ccttccacccacagctcctccacgttggtctcgaggttcgctgcttttaatcccaccgcgaaggccccaaatatgaggaggcccacaaccaagaacttgccgcagtttttttgaatgtaacaacccagtttaaataagagtctctgaaacttcgctctcagccacagcggcgctttccggccagtagccttccc

SEQ ID NO: 8901 - DNA, 202 bp, synthetic construct
  misc_feature 1..202: note = Description of artificial sequence: synthetic polynucleotide sequence
  source 1..202: mol_type = other DNA
ccttggaaatctgctccagagcgaaggcggcgtcgcagtagctgggccggtgcagatagtcccggtccggcgcggcagcacggcgcagcccccccgtccgtctgcgcctcccgcctccagccggccgtcccggggcaccgatacagccgctgccgccgccgccgcggtcctggggctcggcggcgttaccagccgaggccat

SEQ ID NO: 8902 - DNA, 121 bp, synthetic construct
  misc_feature 1..121: note = Description of artificial sequence: synthetic polynucleotide sequence
  source 1..121: mol_type = other DNA
gaggagcacggcgcgcgaggcgaggtggcgtcggcggccgccgcgctggctgcactcaccatagccggccgtcaacccctgctcggagcgcgggtgccgatggcgcggacgctgggcttgg

SEQ ID NO: 8903 - DNA, 199 bp, synthetic construct
  misc_feature 1..199: note = Description of artificial sequence: synthetic polynucleotide sequence
  source 1..199: mol_type = other DNA
ccttgtcgctgcgggtctctttgtctcccctgtcgtctttttcttctcctccgttttcttcttcttcttctcctcctcctccgtctttacaaaaggaacggaaagtgtaaaaaccccggcgcgctgggccgccggaggctttcggcggagtgcagcgcggactcacaattacaagcctgtttctattaagcagttccat

SEQ ID NO: 8904 - DNA, 121 bp, synthetic construct
  misc_feature 1..121: note = Description of artificial sequence: synthetic polynucleotide sequence
  source 1..121: mol_type = other DNA
gcattctacattcaaagtttgaactgtttttatgtttaaggctgtattgcatccaaatattctatttttcctttattctttcattttctatgtactttgcaaattctggaaattgacttgg

SEQ ID NO: 8905 - DNA, 121 bp, synthetic construct
  misc_feature 1..121: note = Description of artificial sequence: synthetic polynucleotide sequence
  source 1..121: mol_type = other DNA
cagtacaaacttttcttggaaaggaaattactctctactggaaggaaaagacaaaaaaccagtggacatgataattaaatgttatgataagtgctacagaggcaataaaatgatgagatag

SEQ ID NO: 8906 - DNA, 121 bp, synthetic construct
  misc_feature 1..121: note = Description of artificial sequence: synthetic polynucleotide sequence
  source 1..121: mol_type = other DNA
cttctccttttccgcttccctggatccatcttctgttgcatttcccatcggatttccattctctgttaactctcttcatcgtcacacctacagagctccctctctttgcattccctaatcc

SEQ ID NO: 8907 - DNA, 121 bp, synthetic construct
  misc_feature 1..121: note = Description of artificial sequence: synthetic polynucleotide sequence
  source 1..121: mol_type = other DNA
aggcagttatttttcttgggttggtctgagacagagctagccaagtgattttaatccaagggccaactgtgtgccattacctgaagttatcgggaacactgtcttcagaagaattctgact

SEQ ID NO: 8908 - DNA, 121 bp, synthetic construct
  misc_feature 1..121: note = Description of artificial sequence: synthetic polynucleotide sequence
  source 1..121: mol_type = other DNA
gttttccggaaacccgccaatgacatcacatcccagctggagattaattttggtaacctccctcgtcctgggcgtggagccagaggaggcacccggggaggccggggaaggatcaggaggg

SEQ ID NO: 8909 - DNA, 121 bp, synthetic construct
  misc_feature 1..121: note = Description of artificial sequence: synthetic polynucleotide sequence
  source 1..121: mol_type = other DNA
tagtggtttaaataatgtaatttttatgtctgaaacagattttattcattagtctcccaatgtactagatatttacctcaatatgatggtaggatgactgtccaatcactataagggtgac

SEQ ID NO: 8910 - DNA, 121 bp, synthetic construct
  misc_feature 1..121: note = Description of artificial sequence: synthetic polynucleotide sequence
  source 1..121: mol_type = other DNA
actcaagactgaatatggtagactggattttccagagatggctgtggacataggctatcaaagggtttttgggatacacagtcccacatgccccttccctcccattgcattcacaatggat

SEQ ID NO: 8911 - DNA, 121 bp, synthetic construct
  misc_feature 1..121: note = Description of artificial sequence: synthetic polynucleotide sequence
  source 1..121: mol_type = other DNA
cccatccttggtcctccctggattcaggtgcagctggtccactccctggcggccaccaggaagcgggctgcagagcgttctgtgaccctgaagagtggcaggatacccatgatgaagaagg

SEQ ID NO: 8912 - DNA, 121 bp, synthetic construct
  misc_feature 1..121: note = Description of artificial sequence: synthetic polynucleotide sequence
  source 1..121: mol_type = other DNA
aaatttttctgttggcaaaaaacctaatccagcaccgttaagagacaaaggaaactctgttggagttaagcctgatgctgaaatgtctccttatatgctacacacaactcttggaaatgaa

SEQ ID NO: 8913 - DNA, 121 bp, synthetic construct
  misc_feature 1..121: note = Description of artificial sequence: synthetic polynucleotide sequence
  source 1..121: mol_type = other DNA
catcagcatgttgtgttgccacatgtctatggatgctggtttggtctgtgaatagctgccgacagcatttccacaatttttctttacattcaaaactcctttttgttggaacttctttggt

SEQ ID NO: 8914 - DNA, 121 bp, synthetic construct
  misc_feature 1..121: note = Description of artificial sequence: synthetic polynucleotide sequence
  source 1..121: mol_type = other DNA
aggagtaaaccgcacttctaaagtggccacaggagcctctgtcacccaggcaggaaccacgctgcggggagctccatcagcccttccagcagggcagtgaggggccatgggctgtgtctct

SEQ ID NO: 8915 - DNA, 121 bp, synthetic construct
  misc_feature 1..121: note = Description of artificial sequence: synthetic polynucleotide sequence
  source 1..121: mol_type = other DNA
gattgtgctaagttccagaagagtgagctagaattcaagtttaatcggaaagccttggagaggccatacacctcgaagcattcctgggggaagacgtacggggagcacaaacgacatctgg

SEQ ID NO: 8916 - DNA, 121 bp, synthetic construct
  misc_feature 1..121: note = Description of artificial sequence: synthetic polynucleotide sequence
  source 1..121: mol_type = other DNA
tggggtgctggcgtcagaggccaagggctgctcctccctctgaggctccccactctgtggagaatcttcccctggaggttcatggcctgttccctgggcctgcttgttgccacggatgttg

SEQ ID NO: 8917 - DNA, 121 bp, synthetic construct
  misc_feature 1..121: note = Description of artificial sequence: synthetic polynucleotide sequence
  source 1..121: mol_type = other DNA
tctgaaatctcaatgtcctcgccatacagaactccagtcaggtcattccgcacctgtcagcaaagagaaagcagagggtgggtgtgctggggaccacaggaagggccagttccgaggggtc

SEQ ID NO: 8918 - DNA, 121 bp, synthetic construct
  misc_feature 1..121: note = Description of artificial sequence: synthetic polynucleotide sequence
  source 1..121: mol_type = other DNA
cggcctcccaaagtgctgggattacaggcatgagccactgcacccagcctttactcacaatcttggttatctagtttggggtccagacctattctgtcaccatcagggagacggtcccttt

SEQ ID NO: 8919 - DNA, 121 bp, synthetic construct
  misc_feature 1..121: note = Description of artificial sequence: synthetic polynucleotide sequence
  source 1..121: mol_type = other DNA
gcatccccttccagcggtcctcccaggctttggcttttgagtccagcgctggaatcttcatgggcaatgcaggagctacagggctcgagagattcactgtgagttaaagtcccactccagg

SEQ ID NO: 8920 - DNA, 121 bp, synthetic construct
  misc_feature 1..121: note = Description of artificial sequence: synthetic polynucleotide sequence
  source 1..121: mol_type = other DNA
cgcccggccactgcctacctttttaaagaatgtgtcctaagcatggttaagtttgatacagacattcggtgcttgccaaatacaggctgagtttaggatggctcaccaaatatatagcttg

SEQ ID NO: 8921 - DNA, 121 bp, synthetic construct
  misc_feature 1..121: note = Description of artificial sequence: synthetic polynucleotide sequence
  source 1..121: mol_type = other DNA
actcagctggtgacaattggtgtcatgatttccttcactctagccaaggtggaccaggcgaagtctgaacaaaaagagtttctgcaaggttcaggggaaatgaaaggacttctctggccac

SEQ ID NO: 8922 - DNA, 121 bp, synthetic construct
  misc_feature 1..121: note = Description of artificial sequence: synthetic polynucleotide sequence
  source 1..121: mol_type = other DNA
aaagacatctacagatattagatcatggaagcccttatatgtgaagagcctagacatgtttctatagataccattcaattatttaaatcctttaagaatgagcttggtgtagtcagatttg

SEQ ID NO: 8923 - DNA, 121 bp, synthetic construct
  misc_feature 1..121: note = Description of artificial sequence: synthetic polynucleotide sequence
  source 1..121: mol_type = other DNA
aataaaaactgcccagtagacaagagacgtcgaaaccgatgtcagtactgtcgatttcagaagtgtctcagtgttggaatggtaaaagaaggtatggatataatgctttttacccagtttg

SEQ ID NO: 8924 - DNA, 121 bp, synthetic construct
  misc_feature 1..121: note = Description of artificial sequence: synthetic polynucleotide sequence
  source 1..121: mol_type = other DNA
gggcgaattctccatttctatggggaattcaatttaaattactttattttgactttcaaatagcatagttaactgataaaagctgtatcgtcctgggttccagtctggctccctccattta

SEQ ID NO: 8925 - DNA, 121 bp, synthetic construct
  misc_feature 1..121: note = Description of artificial sequence: synthetic polynucleotide sequence
  source 1..121: mol_type = other DNA
tatgtgtgcatttgtttcctgctgtagccaagattcttgacccttttatgttggcagcgttctttgaacactggagcattacttccccttcttcatgggatttaaaaaagagctcgaagca

SEQ ID NO: 8926 - DNA, 121 bp, synthetic construct
  misc_feature 1..121: note = Description of artificial sequence: synthetic polynucleotide sequence
  source 1..121: mol_type = other DNA
cttagcacaaactttcttgagcagaatcttgggagcaaatgggaactgctgaagatatgagtgcaggagcccttgccattgtgagtagatggggaggggtgtggcttgctttctcagtggg

SEQ ID NO: 8927 - DNA, 121 bp, synthetic construct
  misc_feature 1..121: note = Description of artificial sequence: synthetic polynucleotide sequence
  source 1..121: mol_type = other DNA
ccccttctctttttttccagtgctgttgcctcaaatctgacccttattatttctcatctgttctcatgcaattttctcccttaacccatagctgaattaaggcccttaagtgctctgggca

SEQ ID NO: 8928 - DNA, 121 bp, synthetic construct
  misc_feature 1..121: note = Description of artificial sequence: synthetic polynucleotide sequence
  source 1..121: mol_type = other DNA
gcttgatcctgtcaacaatggggaatcagtgaaggcactagagagtgatggtcacatatgtgatggagaaagatcccagtgagaatgaacctagagagaatggggaagggagaagctgact

SEQ ID NO: 8929 - DNA, 121 bp, synthetic construct
  misc_feature 1..121: note = Description of artificial sequence: synthetic polynucleotide sequence
  source 1..121: mol_type = other DNA
cttgtaacactgtgggtggtccatggttcttttcaggctcttatggattttttaggtaggtgcagagctaccttttggctgaagccttctgaaagtcatggctgtgttcctaaacagaggc

SEQ ID NO: 8930 - DNA, 121 bp, synthetic construct
  misc_feature 1..121: note = Description of artificial sequence: synthetic polynucleotide sequence
  source 1..121: mol_type = other DNA
cccttttaggaccattaaactatttttatcagcccatccctaggtcctgtctaaatttcatatttcctgagtcaaagaatcccaataaataactcctatgaccaaaatcaactctatgaaa

SEQ ID NO: 8931 - DNA, 121 bp, synthetic construct
  misc_feature 1..121: note = Description of artificial sequence: synthetic polynucleotide sequence
  source 1..121: mol_type = other DNA
agaaaatatgtttgtacatgcatggattacctctggaaaaaatacacaaaagaattggttatgatcaatcttctgaataaagaaacagagtggctagggaacaaggggggaaattcgtttt

SEQ ID NO: 8932 - DNA, 121 bp, synthetic construct
  misc_feature 1..121: note = Description of artificial sequence: synthetic polynucleotide sequence
  source 1..121: mol_type = other DNA
ttttttccctaatagttccaaagtgaaaacatcccaaatgtccacacaggatcaattccagtatatgcatgcaatggaataactacaaaacagtaagaactccagtcatctcactgacaca

SEQ ID NO: 8933 - DNA, 121 bp, synthetic construct
  misc_feature 1..121: note = Description of artificial sequence: synthetic polynucleotide sequence
  source 1..121: mol_type = other DNA
accaatattgaaaaatacagaaattgaaattgtaggtaaacccctggatggttatagttaaggacagaaagacaaggagtgaaagaaactccgtgaaacaggaaatgccaagaaaagccta

SEQ ID NO: 8934 - DNA, 121 bp, synthetic construct
  misc_feature 1..121: note = Description of artificial sequence: synthetic polynucleotide sequence
  source 1..121: mol_type = other DNA
agtgaaaccatgggctaaaatctgtatttcccaagtccttgggatatgggccatgagttaagattcttagattttatgtaagttttcaaggacaaggggacggggtaattcctttttttat

SEQ ID NO: 8935 - DNA, 121 bp, synthetic construct
  misc_feature 1..121: note = Description of artificial sequence: synthetic polynucleotide sequence
  source 1..121: mol_type = other DNA
cctatcatatctaccaagctttgggggattttctctttatcctgggaattcagaaatttcatgaggatataatgtttcattattcttgcctagcactcaatggaccctttcaatttgtaga

SEQ ID NO: 8936 - DNA, 121 bp, synthetic construct
  misc_feature 1..121: note = Description of artificial sequence: synthetic polynucleotide sequence
  source 1..121: mol_type = other DNA
gagcctcagagaggttccttaccctgtgaggtcatctgtggtaacgctggatgggccggatgaagagagggctggacggacggagtcaccacaggctgcccacctccttgcagagtgttca

SEQ ID NO: 8937 - DNA, 121 bp, synthetic construct
  misc_feature 1..121: note = Description of artificial sequence: synthetic polynucleotide sequence
  source 1..121: mol_type = other DNA
caggtcaaataaagacagctctttaaagtgagggcttccagacaactgttagacacatcgaatgatgacaattttctggaaatgaagctttgaaggaacagcaaccctgttaagcccccat

SEQ ID NO: 8938 - DNA, 121 bp, synthetic construct
  misc_feature 1..121: note = Description of artificial sequence: synthetic polynucleotide sequence
  source 1..121: mol_type = other DNA
caatggaacgggcagttcttcacaatgttctcaaatgctgaagaggaagaattgctgtcgttagcacaaggctgtggacttggacaatacacttttctgtttattcattgattttctgagc

SEQ ID NO: 8939 - DNA, 121 bp, synthetic construct
  misc_feature 1..121: note = Description of artificial sequence: synthetic polynucleotide sequence
  source 1..121: mol_type = other DNA
agtgaactgaggctcaaggggctgaagccttttgcctatataggtctttctggaaggctttggtctttccactgtgtgctctgacacggtgcaatagtgaactacttatttcacgggggat

SEQ ID NO: 8940 - DNA, 121 bp, synthetic construct
  misc_feature 1..121: note = Description of artificial sequence: synthetic polynucleotide sequence
  source 1..121: mol_type = other DNA
atctttaccttcatttcacttgtccaaattatatcctctgttctgctgccaagatcctatgcaagccaagtctggcagagcctactctatactacaaccacctgtgatagttcacctgcat

SEQ ID NO: 8941 - DNA, 121 bp, synthetic construct
  misc_feature 1..121: note = Description of artificial sequence: synthetic polynucleotide sequence
  source 1..121: mol_type = other DNA
acttgaccaacatcacaaaccatcctaaaatagttctggagacagaatatgcagccgactccctccaaagctgctaaggaaacgtgaattgtgacaatttgatctacaaaatagcttctat

SEQ ID NO: 8942 - DNA, 121 bp, synthetic construct
  misc_feature 1..121: note = Description of artificial sequence: synthetic polynucleotide sequence
  source 1..121: mol_type = other DNA
tcagctcctttttactgtgagcaaaagggaggcaaagaaagacatctcaacttgtattttataagtgccaaacactttgtataaagccaagggcttcattgctataacattaggttggagt

SEQ ID NO: 8943 - DNA, 121 bp, synthetic construct
  misc_feature 1..121: note = Description of artificial sequence: synthetic polynucleotide sequence
  source 1..121: mol_type = other DNA
atctgtggtctcggaagtcagagccagtatcacagaccagcagcagcaactgtccatttggattctggggtggaaactgttttctctgttttctgacctttgctatgggttacaggttgaa

SEQ ID NO: 8944 - DNA, 121 bp, synthetic construct
  misc_feature 1..121: note = Description of artificial sequence: synthetic polynucleotide sequence
  source 1..121: mol_type = other DNA
tatcctcaggctgactgtctcttcacgatgccttttcaaatcaaccaaactttctcctcatttgaacctaagaaaaaaattccaaaagttcacaaaaataaataacgagttacctcaaaga

SEQ ID NO: 8945 - DNA, 121 bp, synthetic construct
  misc_feature 1..121: note = Description of artificial sequence: synthetic polynucleotide sequence
  source 1..121: mol_type = other DNA
gttaagggctaaaaatggaccaaaggaaaactcatatgcacaaggctgtgatgcacatacggatgaatggatttgtcttaaagggtaaaaccatttcaaatagagaagcacaggagatcta

SEQ ID NO: 8946 - DNA, 121 bp, synthetic construct
  misc_feature 1..121: note = Description of artificial sequence: synthetic polynucleotide sequence
  source 1..121: mol_type = other DNA
ccttcttgagaccctagttttaataactgtatcccttgattatattcctgacctagactcgagattcaaaccagaataacagaaaactaacactcctgggacctttatttattatgagcca

SEQ ID NO: 8947 - DNA, 121 bp, synthetic construct
  misc_feature 1..121: note = Description of artificial sequence: synthetic polynucleotide sequence
  source 1..121: mol_type = other DNA
tctaccttgaagggattgttgcacaagcctttagatcactcctttaaggacatgtcaccaaaagggcaaattcacttacttgtcataaagcagaagccaaaagcctcattatactaattaa

SEQ ID NO: 8948 - DNA, 121 bp, synthetic construct
  misc_feature 1..121: note = Description of artificial sequence: synthetic polynucleotide sequence
  source 1..121: mol_type = other DNA
aaccaaaagagaacttcaacaatcaggcctcgggagaggcaaaaattcctggacatctctttagggcctgctttccagatgattctgcgtcaatatccttctggccaagtatcctttttct

SEQ ID NO: 8949 - DNA, 121 bp, synthetic construct
  misc_feature 1..121: note = Description of artificial sequence: synthetic polynucleotide sequence
  source 1..121: mol_type = other DNA
agtcaacacatctgaagaggaaatagcttcaagtcatagagaccagcaagttcaaggtcctcattctgcctgtagacaagttctggagatgggaggtgtggcttgttcaaggtttcccagc

SEQ ID NO: 8950 - DNA, 121 bp, synthetic construct
  misc_feature 1..121: note = Description of artificial sequence: synthetic polynucleotide sequence
  source 1..121: mol_type = other DNA
aatgagaaccttaggaacacttatccaccaaacattggatcataaatgcagggaaggtaagcactggagatggaatgggtattttttccctctcagcaatagatgagtttataagtgcata

SEQ ID NO: 8951 - DNA, 121 bp, synthetic construct
  misc_feature 1..121: note = Description of artificial sequence: synthetic polynucleotide sequence
  source 1..121: mol_type = other DNA
ggtgtgtgcattgtctcgtgtgtttcacatgtgcatgcttttgggtgggaatggctgcacgtggctatgagtgtatgctgccaaagccagaataagggcagagactgatagttgcaggtac

SEQ ID NO: 8952 - DNA, 121 bp, synthetic construct
  misc_feature 1..121: note = Description of artificial sequence: synthetic polynucleotide sequence
  source 1..121: mol_type = other DNA
gtggcgaccgtggccgaggctcggattcacgggtggaagccagattctcccatggggcccaccacatctcctcactcgagcctgtagcagctctctccccgtctcgggtcttcagttgccg

SEQ ID NO: 8953 - DNA, 121 bp, synthetic construct
  misc_feature 1..121: note = Description of artificial sequence: synthetic polynucleotide sequence
  source 1..121: mol_type = other DNA
cgatagaacctttaaaattcgtgactagagcaatcatatacttaacagagctaagtggttacctttacttcactcatattcaagactgaaaagaatttacacataagctagtttcaagatc

SEQ ID NO: 8954 - DNA, 121 bp, synthetic construct
  misc_feature 1..121: note = Description of artificial sequence: synthetic polynucleotide sequence
  source 1..121: mol_type = other DNA
agctactgacccaacattagttcaagtgtgtgcagcaaatgtcttagccacctctttcatatagctatataattaaaaactatgtaaggagctgggtggtttgagggaaaaaaattaaatc

SEQ ID NO: 8955 - DNA, 121 bp, synthetic construct
  misc_feature 1..121: note = Description of artificial sequence: synthetic polynucleotide sequence
  source 1..121: mol_type = other DNA
tttaaagtgtctgcataaggctcttcattctggtgaatatttcatgaggaatggaaagagcacactactgcatttattctctgctcaggcctcctgaatacatccttcctttggcaggtac

SEQ ID NO: 8956 - DNA, 121 bp, synthetic construct
  misc_feature 1..121: note = Description of artificial sequence: synthetic polynucleotide sequence
  source 1..121: mol_type = other DNA
ggtggatactcaaaaaagtaacagaattatcatataatccagcaaacccacttctgagttcatatgcaaaagaactgaaaacaggatcttgaagagttatttgcctacctatgttcatagt

SEQ ID NO: 8957 - DNA, 121 bp, synthetic construct
  misc_feature 1..121: note = Description of artificial sequence: synthetic polynucleotide sequence
  source 1..121: mol_type = other DNA
gtgtggctttggggagaggctccctgcagcctctggggagtagaggagacctgggaagacactggctgcatcccctcaacagatgccccctccagacctgaaagatggaggctttgaagag

SEQ ID NO: 8958 - DNA, 121 bp, synthetic construct
  misc_feature 1..121: note = Description of artificial sequence: synthetic polynucleotide sequence
  source 1..121: mol_type = other DNA
tgctcaataaacgttacaagactgaaaccagcatggaatctgttatggctcccagcatccgtcccctttgttgccatggcgcccaggtcttgagctaaccagagaataagggaagaaacag

SEQ ID NO: 8959 - DNA, 121 bp, synthetic construct
  misc_feature 1..121: note = Description of artificial sequence: synthetic polynucleotide sequence
  source 1..121: mol_type = other DNA
acctggtcaggtgcagtggcgggtggctgagggcaaaaccaagccttcacaaatctgacatggcagaaactgttttagagaaatgacaagcttaaattgccagggagttaaactgcccagt

SEQ ID NO: 8960 - DNA, 121 bp, synthetic construct
  misc_feature 1..121: note = Description of artificial sequence: synthetic polynucleotide sequence
  source 1..121: mol_type = other DNA
gtggctggaattcccttactctagtactgcaagatagagattattaccccattttctgatgaagatactgacgcatacacaactaagcagaagcttgcctgagatcacaaaactgatgaga

SEQ ID NO: 8961 - DNA, 137 bp, synthetic construct
  misc_feature 1..137: note = Description of artificial sequence: synthetic polynucleotide sequence
  source 1..137: mol_type = other DNA
tatggggcagcagcctggaaaagtacttggggaccaaagaaggccaagcttgcctgccctgcattttatcaaaggagcagggaagaaggaatcatcgaggcatgggggtccacactgcaatgtttttgtggaacatg

SEQ ID NO: 8962 - DNA, 121 bp, synthetic construct
  misc_feature 1..121: note = Description of artificial sequence: synthetic polynucleotide sequence
  source 1..121: mol_type = other DNA
ccgacgtgctggcgcgggaaaatgttggagatctgcctgaagctggtgggctgcaaatccaagaaggggctgtcctcgtcctccagctgttatctggaaggtaagcccgggccgcacgggt

SEQ ID NO: 8963 - DNA, 175 bp, synthetic construct
  misc_feature 1..175: note = Description of artificial sequence: synthetic polynucleotide sequence
  source 1..175: mol_type = other DNA
gaagcccttcagcggccagtagcatctgactttgagcctcagggtctgagtgaagccgctcgttggaactccaaggaaaaccttctcgctggacccagtgaaaatgaccccaaccttttcgttgcactgtatgattttgtggccagtggagataacactctaagcataactaaag

SEQ ID NO: 8964 - DNA, 297 bp, synthetic construct
  misc_feature 1..297: note = Description of artificial sequence: synthetic polynucleotide sequence
  source 1..297: mol_type = other DNA
ggtgaaaagctccgggtcttaggctataatcacaatggggaatggtgtgaagcccaaaccaaaaatggccaaggctgggtcccaagcaactacatcacgccagtcaacagtctggagaaacactcctggtaccatgggcctgtgtcccgcaatgccgctgagtatctgctgagcagcgggatcaatggcagcttcttggtgcgtgagagtgagagcagtcctggccagaggtccatctcgctgagatacgaagggagggtgtaccattacaggatcaacactgcttctgatggcaag

SEQ ID NO: 8965 - DNA, 274 bp, synthetic construct
  misc_feature 1..274: note = Description of artificial sequence: synthetic polynucleotide sequence
  source 1..274: mol_type = other DNA
gctctacgtctcctccgagagccgcttcaacaccctggccgagttggttcatcatcattcaacggtggccgacgggctcatcaccacgctccattatccagccccaaagcgcaacaagcccactgtctatggtgtgtcccccaactacgacaagtgggagatggaacgcacggacatcaccatgaagcacaagctgggcgggggccagtacggggaggtgtacgagggcgtgtggaagaaatacagcctgacggtggccgtgaagaccttgaag

SEQ ID NO: 8966 - DNA, 121 bp, synthetic construct
  misc_feature 1..121: note = Description of artificial sequence: synthetic polynucleotide sequence
  source 1..121: mol_type = other DNA
gtttttttccttctgcaggaggacaccatggaggtggaagagttcttgaaagaagctgcagtcatgaaagagatcaaacaccctaacctggtgcagctccttggtgagtaagcccggggct

SEQ ID NO: 8967 - DNA, 179 bp, synthetic construct
  misc_feature 1..179: note = Description of artificial sequence: synthetic polynucleotide sequence
  source 1..179: mol_type = other DNA
ggggtctgcacccgggagcccccgttctatatcatcactgagttcatgacctacgggaacctcctggactacctgagggagtgcaaccggcaggaggtgaacgccgtggtgctgctgtacatggccactcagatctcgtcagccatggagtacctggagaagaaaaacttcatccacag

SEQ ID NO: 8968 - DNA, 186 bp, synthetic construct
  misc_feature 1..186: note = Description of artificial sequence: synthetic polynucleotide sequence
  source 1..186: mol_type = other DNA
gagatcttgctgcccgaaactgcctggtaggggagaaccacttggtgaaggtagctgattttggcctgagcaggttgatgacaggggacacctacacagcccatgctggagccaagttccccatcaaatggactgcacccgagagcctggcctacaacaagttctccatcaagtccgacgtctggg

SEQ ID NO: 8969 - DNA, 154 bp, synthetic construct
  misc_feature 1..154: note = Description of artificial sequence: synthetic polynucleotide sequence
  source 1..154: mol_type = other DNA
gcatttggagtattgctttgggaaattgctacctatggcatgtccccttacccgggaattgacctgtcccaggtgtatgagctgctagagaaggactaccgcatggagcgcccagaaggctgcccagagaaggtctatgaactcatgcgagcat

SEQ ID NO: 8970 - DNA, 121 bp, synthetic construct
  misc_feature 1..121: note = Description of artificial sequence: synthetic polynucleotide sequence
  source 1..121: mol_type = other DNA
ggtttcatctgtccaggttggcagtggaatccctctgaccggccctcctttgctgaaatccaccaagcctttgaaacaatgttccaggaatccagtatctcagacggtaaagtacccatcc

SEQ ID NO: 8971 - DNA, 166 bp, synthetic construct
  misc_feature 1..166: note = Description of artificial sequence: synthetic polynucleotide sequence
  source 1..166: mol_type = other DNA
gaagtggaaaaggagctggggaaacaaggcgtccgtggggctgtgagtaccttgctgcaggccccagagctgcccaccaagacgaggacctccaggagagctgcagagcacagagacaccactgacgtgcctgagatgcctcactccaagggccagggagagagcg

SEQ ID NO: 8972 - DNA, 341 bp, synthetic construct
  misc_feature 1..341: note = Description of artificial sequence: synthetic polynucleotide sequence
  source 1..341: mol_type = other DNA
gatcctctggaccatgagcctgccgtgtctccattgctccctcgaaaagagcgaggtcccccggagggcggcctgaatgaagatgagcgccttctccccaaagacaaaaagaccaacttgttcagcgccttgatcaagaagaagaagaagacagccccaacccctcccaaacgcagcagctccttccgggagatggacggccagccggagcgcagaggggccggcgaggaagagggccgagacatcagcaacggggcactggctttcacccccttggacacagctgacccagccaagtccccaaagcccagcaatggggctggggtccccaatggagccct

SEQ ID NO: 8973 - DNA, 455 bp, synthetic construct
  misc_feature 1..455: note = Description of artificial sequence: synthetic polynucleotide sequence
  source 1..455: mol_type = other DNA
ccgggagtccgggggctcaggcttccggtctccccacctgtggaagaagtccagcacgctgaccagcagccgcctagccaccggcgaggaggagggcggtggcagctccagcaagcgcttcctgcgctcttgctccgcctcctgcgttccccatggggccaaggacacggagtggaggtcagtcacgctgcctcgggacttgcagtccacgggaagacagtttgactcgtccacatttggagggcacaaaagtgagaagccggctctgcctcggaagagggcaggggagaacaggtctgaccaggtgacccgaggcacagtaacgcctccccccaggctggtgaaaaagaatgaggaagctgctgatgaggtcttcaaagacatcatggagtccagcccgggctccagcccgcccaacctgactccaaaacccctccggcggcaggtcaccgtgg

SEQ ID NO: 8974 - DNA, 456 bp, synthetic construct
  misc_feature 1..456: note = Description of artificial sequence: synthetic polynucleotide sequence
  source 1..456: mol_type = other DNA
cccctgcctcgggcctcccccacaaggaagaagctggaaagggcagtgccttagggacccctgctgcagctgagccagtgacccccaccagcaaagcaggctcaggtgcaccagggggcaccagcaagggccccgccgaggagtccagagtgaggaggcacaagcactcctctgagtcgccagggagggacaaggggaaattgtccaggctcaaacctgccccgccgcccccaccagcagcctctgcagggaaggctggaggaaagccctcgcagagcccgagccaggaggcggccggggaggcagtcctgggcgcaaagacaaaagccacgagtctggttgatgctgtgaacagtgacgctgccaagcccagccagccgggagagggcctcaaaaagcccgtgctcccggccactccaaagccacagtccgccaagccgtcggggacccccatca

SEQ ID NO: 8975 - DNA, 464 bp, synthetic construct
  misc_feature 1..464: note = Description of artificial sequence: synthetic polynucleotide sequence
  source 1..464: mol_type = other DNA
gcccagcccccgttccctccacgttgccatcagcatcctcggccctggcaggggaccagccgtcttccaccgccttcatccctctcatatcaacccgagtgtctcttcggaaaacccgccagcctccagagcggatcgccagcggcgccatcaccaagggcgtggtcctggacagcaccgaggcgctgtgcctcgccatctctaggaactccgagcagatggccagccacagcgcagtgctggaggccggcaaaaacctctacacgttctgcgtgagctatgtggattccatccagcaaatgaggaacaagtttgccttccgagaggccatcaacaaactggagaataatctccgggagcttcagatctgcccggcgacagcaggcagtggtccagcggccactcaggacttcagcaagctcctcagttcggtgaaggaaatcagtgacatagtgcagaggtag

SEQ ID NO: 8976 - DNA, 121 bp, synthetic construct
  misc_feature 1..121: note = Description of artificial sequence: synthetic polynucleotide sequence
  source 1..121: mol_type = other DNA
atcatgagcagcaaaaaaaaattaaaccaaaaccagaaaatgaaaccccacacatgatcccaatggtaatacaaatgaaatctttaaagatattggttaggaacactcaggttgatacaaa

SEQ ID NO: 8977 - DNA, 121 bp, synthetic construct
  misc_feature 1..121: note = Description of artificial sequence: synthetic polynucleotide sequence
  source 1..121: mol_type = other DNA
gtccacgggctggtagaagggccaggcgaactggtgtttccagagcgtcttcaccaccacattctgcatgtactgcagctggttggtcttgcggccgggcttgctggggttggagacctcc

SEQ ID NO: 8978 - DNA, 121 bp, synthetic construct
  misc_feature 1..121: note = Description of artificial sequence: synthetic polynucleotide sequence
  source 1..121: mol_type = other DNA
gtgggttcacagggcccggggtcgccgggatccccgcgggggcgactgtcgtggcggtggacatcctccggcagctcactcactttctgtcacagcagcggcttggagaggccctggctgc

SEQ ID NO: 8979 - DNA, 121 bp, synthetic construct
  misc_feature 1..121: note = Description of artificial sequence: synthetic polynucleotide sequence
  source 1..121: mol_type = other DNA
ggagccaggccatgtcccatcccggagcgccagaggctcctccgtagagcgagtttggcgcggttggctgcggctcgaggctccaggtgggcttgtccgtcccgcaagggctcacatgcca

SEQ ID NO: 8980 - DNA, 121 bp, synthetic construct
  misc_feature 1..121: note = Description of artificial sequence: synthetic polynucleotide sequence
  source 1..121: mol_type = other DNA
tcacaagggctcagtcactcacgccacacaactaaataagcactcaccagaccttttcagtgatgaatgctttgacaacgaaaatacgtccacaacattctcaccccagaatggctggccc

SEQ ID NO: 8981 - DNA, 442 bp, synthetic construct
  misc_feature 1..442: note = Description of artificial sequence: synthetic polynucleotide sequence
  source 1..442: mol_type = other DNA
cctaacaggcaggtgatgctggtggagcggccgggctggcttggggttgggtgggcgtcggggaaagggcgcggcctggacgccccaggagctttttggactatgctcgttcaacttcccttctccaacatcatttctttttggattttgaaaaaaggaatcaataaataaatggcatttataaatcatgaatctttgtttatattttataaacacagaagaatcttttcatcctacgtaggaaaaccctggctctcagaacttgcttgttttctcagaatagataaaagtttctacctggggccagataaaacagtacatataaataaaaaggcagtgtttctgtgtaaaataaaagtacataaataaatactaaaaaaaattaaaatcctcgttcttattttgtataaaaacatgtgttttaaaaaggctcctctggtcg

SEQ ID NO: 8982 - DNA, 228 bp, synthetic construct
  misc_feature 1..228: note = Description of artificial sequence: synthetic polynucleotide sequence
  source 1..228: mol_type = other DNA
tttacttgaaggcctccggaatgcgggcgatctgggactgcatgctggtgggagggctggagacgccctcggaccagtcggagacgttggaatgcggggacgagctggaccactggtcaggggactcaggggacggggtgaggaaggggtgctcaggcacctgtagctggtggctgggggtgttgtccacaggcgaggagtagctgtgctgcgaggggggcgtcagga

SEQ ID NO: 8983 - DNA, 456 bp, synthetic construct
  misc_feature 1..456: note = Description of artificial sequence: synthetic polynucleotide sequence
  source 1..456: mol_type = other DNA
actgggctgcggtcacgggtgggaccagcgaggatggcagcgacgtgggcagggcggggctctcctggggcagaatagtgtgcaccgccaggctgctggggcccagtggctgcacgtctgcctggctcggctctccactcaggaagctccggcccaggtggccgctggctgctgagctcacgccaaggtgcggctgtggtggtggtggtggcggctgcaggctttgctgctgctggatgtttgctggctgcaggttctgctgctgcatctgtaagttttgtggctgcacctgctgggtctgcaccaggtgaggctgggtggccagccgggtgctgggcaggccctggtagctcatcatctgggacagggcgctggcagcaaggctactgtgcagcgggcctaccatgccatgctgcagggagggggcctgtgtgctcagggggcctggtgccacac

SEQ ID NO: 8984 - DNA, 456 bp, synthetic construct
  misc_feature 1..456: note = Description of artificial sequence: synthetic polynucleotide sequence
  source 1..456: mol_type = other DNA
tcccccgcagagggttgtattggttcggcaccatgccgctctgcagccgggacagccactcgcattgaccattcaaactggtggacccgcccacagtgaaattcagggcccctccgctgctggagcccaggacggtgctggtgccagaggccacaggcaggtgggagagacgaggtgggccagtctcaaaggccagccggccgcccccacccagcgccgccatctcgggcttggccgccacgttcaggtgcccgatgcccaggtgggtgtcgggcatcccaggcaggtggttgaggggcacggacggagactgctggaacggggagggcagcagtggcggcgaggccacgtctgacaggtagccatggggtgactccagggagtccacgggcgagagcatgccggagctgtccagcaggcagcccttgccgtcctgggacttcttcctccgtgcct

SEQ ID NO: 8985 - DNA, 349 bp, synthetic construct
  misc_feature 1..349: note = Description of artificial sequence: synthetic polynucleotide sequence
  source 1..349: mol_type = other DNA
tgaggtccttggcctccttgcttccacaggccaggcctttgctgctgggcttgcggaccttcttgccctgcacgccgggcttgaggctgcccaggtagccgttgggcgagcagagcgggggcgacagggtgggcgtgccccccagcggggctccgtgcagctgcgggctgcgcaccaggttgtactcgtccagcagcctcacgatgtcgtgatgcatgcgctcctgtgcgatgtcgcgcggcaggcggtccatatgatccgtgatgtcccggttggcaaagtggtccagcagcaccttggcggtctcgtagctgccctcccgggcggccagaaacaggggtgtctcctc

SEQ ID NO: 8986 - DNA, 121 bp, synthetic construct
  misc_feature 1..121: note = Description of artificial sequence: synthetic polynucleotide sequence
  source 1..121: mol_type = other DNA
cctcgcgctcaccctgttgttctgcatatctttgttagccccgttcttcaggagcacaactgcggcatccacattgttcacggcggcggcccagtgcagggcggacttgcctgcgtgaaag

SEQ ID NO: 8987 - DNA, 149 bp, synthetic construct
  misc_feature 1..149: note = Description of artificial sequence: synthetic polynucleotide sequence
  source 1..149: mol_type = other DNA
cccaggtcatctacggcgttgacgtcggcgtgtgagttgatgaggtcctccagcatgccctccacggccaggcgggcagccaggatcagtggcgtcgtgccatcatgcatgcgggcatccaggtctgtggctcggttccggatcaggat

SEQ ID NO: 8988 - DNA, 297 bp, synthetic construct
  misc_feature 1..297: note = Description of artificial sequence: synthetic polynucleotide sequence
  source 1..297: mol_type = other DNA
cctggaagacaccttgtgcgtcggcagacacagccgcatgcagcggggtgcggcccatgttgtcctggatgttggcatctgcgctggcctccagcaggcgcttggcggcatcagagcgtgagtagcgggcggccaggtgcaaggcggtctcgcccgtgcggtctgtctggttgtgcaggctggcgccctggtagatgaagtcggagatgacggccggcgcgtcctcctcttcctcgctgttgcccgtctccaggccgcccccgctgcaggaggcgatcatgagcggggtgaagccat

SEQ ID NO: 8989 - DNA, 167 bp, synthetic construct
  misc_feature 1..167: note = Description of artificial sequence: synthetic polynucleotide sequence
  source 1..167: mol_type = other DNA
ccaggcccgcggacattgacgtccatgcagtcggcgtcaacctcaccctggggcggtgtgggggccatggcagacatgcgcaggtcagcggcatccaggtgctgctgagtccactgccggtggtctgtctggtcgtccaggtcaggcagaaccacgggctcctcgaa

SEQ ID NO: 8990 - DNA, 121 bp, synthetic construct
  misc_feature 1..121: note = Description of artificial sequence: synthetic polynucleotide sequence
  source 1..121: mol_type = other DNA
ggagcctcgcgactcacccggaacttcttggtctccaggtcctcgtccccccactcattctggttgtcgtccatgagggcaccgtctgaagcgttcttcaggggcctggggggtgaggggt

SEQ ID NO: 8991 - DNA, 218 bp, synthetic construct
  misc_feature 1..218: note = Description of artificial sequence: synthetic polynucleotide sequence
  source 1..218: mol_type = other DNA
cttgaggcccacggagtcctcgccgaggggctcccgccgcttcttcttgctggcctcagacactttgaagccctcagggaaccagagctggccatgctgccgccggcgcttgcgggacagcagcaccccgcagcccacgaagaacagaagcacaaaggcggccgccgccacgtacatgaagtgcagctgcgccggcgggggcggctccacggtctcac

SEQ ID NO: 8992 - DNA, 150 bp, synthetic construct
  misc_feature 1..150: note = Description of artificial sequence: synthetic polynucleotide sequence
  source 1..150: mol_type = other DNA
ctctgcacggcctcgatcttgtaggggatgttgaggctgcccagcgaggcgagcgctcccaggaatgcggccacgtcggtggcactctggaagcactgcgaggaggcctgcacacactgccggttgtcaatctccaggtagacgatggag

SEQ ID NO: 8993 - DNA, 433 bp, synthetic construct
  misc_feature 1..433: note = Description of artificial sequence: synthetic polynucleotide sequence
  source 1..433: mol_type = other DNA
cccgcggacgtccatggggtccagctccctccgccgccgcccaccctcgctgccaccagggagcagcgaggccttcacctggcccagcagggcgtcaggtgcggcccagccctcggcggcacgcttgatggggtgcttgcgcagctcctcctcgcggccgtagtaggggaagatcatctgctggccgtgtgcgtcacgcttgaagaccacgttggtgtgcagcacgcggctgagctcccgcaggaagtggaaggagctgttgcgcagctgctccggcggcatcagcaccaccaccaccagcgtgccggccgccagcctctcgggtacatgctccgcacagtccagcccgtcccactcgcactccgcgctgttgcagccctggtcgcagtgcccgtcgctgaagtggtccttgcagtactggtcgtacaggggg

SEQ ID NO: 8994 - DNA, 226 bp, synthetic construct
  misc_feature 1..226: note = Description of artificial sequence: synthetic polynucleotide sequence
  source 1..226: mol_type = other DNA
cttgcactggccttccgcacgctggcagtcaaagccgtcgaagaggcagccggctgagttgcactggctgtcacagtggccgtcactgaagtacttccagcactgcagagactgcgtgcagttcttccaggggtcattgaagttgagggagcagtcaccgccgtcccagccgcacgcgtggttgttgcactgcaggctgcagaccttgttgcccgcgtcctcctgg

SEQ ID NO: 8995 - DNA, 347 bp, synthetic construct
  misc_feature 1..347: note = Description of artificial sequence: synthetic polynucleotide sequence
  source 1..347: mol_type = other DNA
cactcgggcagctcgcacgcctcctcgatcagcggcggggggatgtcgcgcccggccccacccccgaagctgtagtccaggatgtggcacaagagcccgttgaatttggcggggcacaggcaacggtagaaggggctctcggatgtgggctcacaggtcccctggttgtagcaggggttgccgcccaggcaggggctgctggccgggaactggcattcggggcccgtgaaggggcccaggcacaggcaggtggggctgcgcgggccggagatgcatgtgccgccgttgaggcagcgcaggctgccgcaggtacgagcgtcattctcacacgtggcgccctcgaagcc

SEQ ID NO: 8996 - DNA, 121 bp, synthetic construct
  misc_feature 1..121: note = Description of artificial sequence: synthetic polynucleotide sequence
  source 1..121: mol_type = other DNA
ctaccgcagggcacttgcagatgaacccgcgggcggtgttggaggccacggcgcaggtgcccccattcttgcagggcttgcctttgcagccattgatgacggactcgcagcggcgccctag

SEQ ID NO: 8997 - DNA, 259 bp, synthetic construct
  misc_feature 1..259: note = Description of artificial sequence: synthetic polynucleotide sequence
  source 1..259: mol_type = other DNA
ccggtgtgaccagcacggcactcgcagtggaagtcattgacgcgctgcacgcagttctgggtgccacgggcgtcgcagggattggacaggcactcgttgacatccccctcacagcgctcacccacgaagcccggcgggcaggtgcagctgtagccgcccacctggtccacgcaggtgccgttgttaaagcacttggggctccgggacacggggtcaacggggggattgcagtcgtccacgttgatctcacagtgcacac

SEQ ID NO: 8998 - DNA, 134 bp, synthetic construct
  misc_feature 1..134: note = Description of artificial sequence: synthetic polynucleotide sequence
  source 1..134: mol_type = other DNA
ccctgagtgccccgtgggcaggagcacttgtaggtgttggggaggtcgaggcaggtgcccccgttctggcaggggtgggagaggcactcgtcgatctcctcagagcagttcaccccgtggtagccggccacgca

SEQ ID NO: 8999 - DNA, 186 bp, synthetic construct
  misc_feature 1..186: note = Description of artificial sequence: synthetic polynucleotide sequence
  source 1..186: mol_type = other DNA
ccttgcaggagtagccgcccaggtagtccgtgcaggtggccccgttctggcaggggctgggtgagcactcgtccaccaggtcctcacagtagctgcctgtgtagcccgcctggcagcggcagtggtgcgtgttgcccgcgtccacacagagccctccatgctggcacaggcgggcaacgtcaacac

SEQ ID NO: 9000 - DNA, 155 bp, synthetic construct
  misc_feature 1..155: note = Description of artificial sequence: synthetic polynucleotide sequence
  source 1..155: mol_type = other DNA
ccttgtcgctgcgcagccacctcacaggacacgctgggcacgtcgcagtaaaggccggtccagccgctggggcactcgcagcggtactgggtgtgggtctgccagcatttgccgccgttcttgcagggcgaggagtcacaccagtgcacaaggtt

SEQ ID NO: 9001 - DNA, 203 bp, synthetic construct
  misc_feature 1..203: note = Description of artificial sequence: synthetic polynucleotide sequence
  source 1..203: mol_type = other DNA
cctggcagttggggccagtgtagccctgggggcaggtgcacctgtaggagccgcagccgtcctgacaggtgccgccatgcaggcagggctgtgagtcgcactcattgacatcgtgctggcagtagctgcccgtgaagccgggtggacacaggcaggtgaacgagttgatgccgtccacgcaggtgccaccgttgaagcaggag

SEQ ID NO: 9002 - DNA, 230 bp, synthetic construct
  misc_feature 1..230: note = Description of artificial sequence: synthetic polynucleotide sequence
  source 1..230: mol_type = other DNA
cctctctgtgcagtcaggcgtgttgttctcacagtggatcccgctgaagcctgcggggcaggtgcacgtgtagctgtccacgcagtccgtgcagttggccccgttgcggcaggggtcactggcacactcgttgatgtcctcctcacagaaagtgccccggaagccgggcaggcagtcgcagaaggccgtgttgatgccgtctgtgcaggagcccccgttgtgacacgggt

SEQ ID NO: 9003 - DNA, 154 bp, synthetic construct
  misc_feature 1..154: note = Description of artificial sequence: synthetic polynucleotide sequence
  source 1..154: mol_type = other DNA
ctgggccggcagtcgtcgatgtcggtctcgcagttgcgcccactgtagccggcctggcagtggcagcggtagccgccgtgggtgttctggcaggatgcgccgtgccggcacgggctcagaacgcactcgttgatgtcgacctcacaggtctgcc

SEQ ID NO: 9004 - DNA, 121 bp, synthetic construct
  misc_feature 1..121: note = Description of artificial sequence: synthetic polynucleotide sequence
  source 1..121: mol_type = other DNA
ccttgccagcccgtggggcagacacaggagaagctctcatagtcctcggattgcctgcactccccgccgtttctgcaggggctgggggcacacggggccagcaccacctcacacgtggcac

SEQ ID NO: 9005 - DNA, 121 bp, synthetic construct
  misc_feature 1..121: note = Description of artificial sequence: synthetic polynucleotide sequence
  source 1..121: mol_type = other DNA
tcacctgtgtagggcagcaggcagttgcacttgtacccggcaacgtcgtcaatacacgtgccctggttcagacatgggttggacgcacactcgttgatgttggtctggcagttgggacctg

SEQ ID NO: 9006 - DNA, 147 bp, synthetic construct
  misc_feature 1..147: note = Description of artificial sequence: synthetic polynucleotide sequence
  source 1..147: mol_type = other DNA
ccgctgaagccctcccggcaggtgcacacgtagccactggtcatgtctttgcaggtgccgccgttgacacaagggttggattcacactcattgttgttgatgtcacagttggtcccactccacccagggtcacagtcgcacttgtac

SEQ ID NO: 9007 - DNA, 194 bp, synthetic construct
  misc_feature 1..194: note = Description of artificial sequence: synthetic polynucleotide sequence
  source 1..194: mol_type = other DNA
cccgttgaggctgtcccggcaggccccgtggacgcaggggttgctgttgcactcattgacctcagacaggcaggtggggtcgtggtagccctcggggcagcggcaggtgaagccattgatgccgtcctcgcaggtgcccccgttgtggcaggggttgcccgcacactcatcgatgttgatgttacacatgctcc

SEQ ID NO: 9008 - DNA, 121 bp, synthetic construct
  misc_feature 1..121: note = Description of artificial sequence: synthetic polynucleotide sequence
  source 1..121: mol_type = other DNA
ctcacctgtgtagcccggctcacaggcacactcgtagccatcgatcttgtccagacaggtgcccgagtcgcaggggctgctggcacagtcatccaggttgatctcgcagttgggtcctgaa

SEQ ID NO: 9009 - DNA, 235 bp, synthetic construct
  misc_feature 1..235: note = Description of artificial sequence: synthetic polynucleotide sequence
  source 1..235: mol_type = other DNA
cctgtggtccccttcaggcagaagcagaggtaggcgttgtcgcggtcctggcaggtgcccccgtggcggcagggctggctggagcactcgttgatgttggtctcgcagtggtggcccgtgtagcctgggcggcagaggcaggtgaaggtggcgacgccgtccttgcaggagccgtagtggcaggggtcggggtcgcactcatcgatgtccacctcgcagtgcgtccccgtgtacc

SEQ ID NO: 9010 - DNA, 121 bp, synthetic construct
  misc_feature 1..121: note = Description of artificial sequence: synthetic polynucleotide sequence
  source 1..121: mol_type = other DNA
gcaccttccgtgcacacacaggtgtaagtgttgggtccgtccaggcacttggcaccattcttgcagggggtgctggcacactcgtccacatcgtactggcacagatgcccagtgaagcctg

SEQ ID NO: 9011 - DNA, 121 bp, synthetic construct
  misc_feature 1..121: note = Description of artificial sequence: synthetic polynucleotide sequence
  source 1..121: mol_type = other DNA
tcacccgtggggcactcgcactggaactcattgatcttgtccaggcagcggccattgtgcaggcaggggctgctggcacactcgtctgtgttgacctcgcagtgcacaccctcgtagcctg

SEQ ID NO: 9012 - DNA, 187 bp, synthetic construct
  misc_feature 1..187: note = Description of artificial sequence: synthetic polynucleotide sequence
  source 1..187: mol_type = other DNA
ccgggcatgcagatgcactggaactccccaatctggtccaggcaggtggcgtcgttctggcacgggttcgagacgcactcgttgacgtcgatctcgcatcgggggcccgtgtagccctgcagacactggcactcgaaggagcccagcgtgttgatgcacttgcccgcatgctcgcaggggttggcac

SEQ ID NO: 9013 - DNA, 157 bp, synthetic construct
  misc_feature 1..157: note = Description of artificial sequence: synthetic polynucleotide sequence
  source 1..157: mol_type = other DNA
cccagcgagcactcatccacgtcctggctgcaggccgggcccgtgtaccccgaggggcaggtgcagatggccttgccattgacagggttggtgtcgcagttggagccctcgttacaggggttgctgatgcatgcgtcgttgaggtggcacagcagac

SEQ ID NO: 9014 - DNA, 235 bp, synthetic construct
  misc_feature 1..235: note = Description of artificial sequence: synthetic polynucleotide sequence
  source 1..235: mol_type = other DNA
cctgtgcggccatggggacactcgcagtagaaggaggccacacggtcatggcaggtggcgccgtggaagcaggcggcgctggcacagtcatcaatgttctcgctgcagtcctcaccagtccagccgttgacacacacgcagttgtagccaccgtgggtgttgtggcaggtcccgccgttctggcaggcatttggcatcagctggcactcgtccacatcctcggtacagtactgac

SEQ ID NO: 9015 - DNA, 121 bp, synthetic construct
  misc_feature 1..121: note = Description of artificial sequence: synthetic polynucleotide sequence
  source 1..121: mol_type = other DNA
tgtccactctggcgggcagcggcagttgtaggtgttcacgccgtccacacaggcacccccgttcttgcagttgtttcctggacaatcgtcgatattttcctcacagttctggccggtgaag

SEQ ID NO: 9016 - DNA, 340 bp, synthetic construct
  misc_feature 1..340: note = Description of artificial sequence: synthetic polynucleotide sequence
  source 1..340: mol_type = other DNA
cctggcaggcaggcacactcgtgggtgacgtcgcccgtggggcggcaggtgcccccgttctggcagggcgaggggctgcagggcacgtagggccgctcgcagttggggccagtgtgggtggcgcggcagacgcagcggtaggagccgacctcgttgtggcaggtgcctccgtggcggcaaagcccgggcttctggccacactcgttgacatcctgccggcaggtggggccatggaagctgggtgggcagtggcagatgtaggaggcctcgaagggcaggcactggccaccgttggcgcaggggttggaggcgcacgggtcagcctgctggcacgatttcc

SEQ ID NO: 9017 - DNA, 264 bp, synthetic construct
  misc_feature 1..264: note = Description of artificial sequence: synthetic polynucleotide sequence
  source 1..264: mol_type = other DNA
cctgaccagccgggcgggcagcggcacttgtactccgtcagcgtgagcaggtcgcaggtgcccccgttgcggcaggggttggtgaggcaggcattgtccaggggtgtcaggcagaggggcccagagaagcccagggcacagctgcaggcatagtctgccacgcctctgcggtccaccacgtggcatgtcccggcgttcttgcagggggtgctgaggcacgggttggggtcctggcatcgcgggcccacgaaggccccgccacag

SEQ ID NO: 9018 - DNA, 121 bp, synthetic construct
  misc_feature 1..121: note = Description of artificial sequence: synthetic polynucleotide sequence
  source 1..121: mol_type = other DNA
tcccgcaggggtggtactcacacgcaggcctccgtgccattggccgcttcacacttcccgccattcaggcaggtctcaccgggctgggagcatcgcgggcctaggcaggggcaggagaaga

SEQ ID NO: 9019 - DNA, 121 bp, synthetic construct
  misc_feature 1..121: note = Description of artificial sequence: synthetic polynucleotide sequence
  source 1..121: mol_type = other DNA
gtgggggctcgcgggtgggtgggcgcctacctcgtgcggcgagcgcgggcagcagcgccaggcagagcaggggcgccaggagcggcggcatgcctccccaccggctgccctctgcgcccgg

SEQ ID NO: 9020 - DNA, 189 bp, synthetic construct
  misc_feature 1..189: note = Description of artificial sequence: synthetic polynucleotide sequence
  source 1..189: mol_type = other DNA
catggctgcagctagcgtgaccccccctggctccctggagttgctacagcccggcttctccaagaccctcctggggaccaagctggaagccaagtacctgtgctccgcctgcagaaacgtcctccgcaggcccttccaggcgcagtgtggccaccggtactgctccttctgcctggccagcatcctcag

SEQ ID NO: 9021 - DNA, 121 bp, synthetic construct
  misc_feature 1..121: note = Description of artificial sequence: synthetic polynucleotide sequence
  source 1..121: mol_type = other DNA
tttgccttttttccccactagctctgggcctcagaactgtgctgcctgtgttcacgagggcatatatgaagaaggcatttctattttagaaagcagttcggtaagtaaaatgtcttgaagc

SEQ ID NO: 9022 - DNA, 121 bp, synthetic construct
  misc_feature 1..121: note = Description of artificial sequence: synthetic polynucleotide sequence
  source 1..121: mol_type = other DNA
cctctccccaggccttcccagataatgctgcccgcagggaggtggagagcctgccggccgtctgtcccagtgatggatgcacctggaaggggaccctgaaagaatacgaggtaaagatgcc

SEQ ID NO: 9023 - DNA, 163 bp, synthetic construct
  misc_feature 1..163: note = Description of artificial sequence: synthetic polynucleotide sequence
  source 1..163: mol_type = other DNA
gagctgccacgaaggccgctgcccgctcatgctgaccgaatgtcccgcgtgcaaaggcctggtccgccttggtgaaaaggagcgccacctggagcacgagtgcccggagagaagcctgagctgccggcattgccgggcaccctgctgcggagcagacgtgaag

SEQ ID NO: 9024 - DNA, 121 bp, synthetic construct
  misc_feature 1..121: note = Description of artificial sequence: synthetic polynucleotide sequence
  source 1..121: mol_type = other DNA
actcctgatcccttcttttgaaggcgcaccacgaggtctgccccaagttccccttaacttgtgacggctgcggcaagaagaagatcccccgggagaaggtgagtgtccttcacctccttgg

SEQ ID NO: 9025 - DNA, 121 bp, synthetic construct
  misc_feature 1..121: note = Description of artificial sequence: synthetic polynucleotide sequence
  source 1..121: mol_type = other DNA
tctgtgacgtcactcccttgtagtttcaggaccacgtcaagacttgtggcaagtgtcgagtcccttgcagattccacgccatcggctgcctcgagacggtgagtcggggggtctgaggttg

SEQ ID NO: 9026 - DNA, 283 bp, synthetic construct
  misc_feature 1..283: note = Description of artificial sequence: synthetic polynucleotide sequence
  source 1..283: mol_type = other DNA
ggtagagggtgagaaacagcaggagcacgaggtgcagtggctgcgggagcacctggccatgctactgagctcggtgctggaggcaaagcccctcttgggagaccagagccacgcggggtcagagctcctgcagaggtgcgagagcctggagaagaagacggccacttttgagaacattgtctgcgtcctgaaccgggaggtggagagggtggccatgactgccgaggcctgcagccggcagcaccggctggaccaagacaagattgaagccctgagtagcaag

SEQ ID NO: 9027 - DNA, 179 bp, synthetic construct
  misc_feature 1..179: note = Description of artificial sequence: synthetic polynucleotide sequence
  source 1..179: mol_type = other DNA
ggtgcagcagctggagaggagcattggcctcaaggacctggcgatggctgacttggagcagaaggtcttggagatggaggcatccacctacgatggggtcttcatctggaagatctcagacttcgccaggaagcgccaggaagctgtggctggccgcatacccgccatcttctccccag

SEQ ID NO: 9028 - DNA, 150 bp, synthetic construct
  misc_feature 1..150: note = Description of artificial sequence: synthetic polynucleotide sequence
  source 1..150: mol_type = other DNA
gccttctacaccagcaggtacggctacaagatgtgtctgcgtatctacctgaacggcgacggcaccgggcgaggaacacacctgtccctcttctttgtggtgatgaagggcccgaatgacgccctgctgcggtggcccttcaaccagaag

SEQ ID NO: 9029 - DNA, 220 bp, synthetic construct
  misc_feature 1..220: note = Description of artificial sequence: synthetic polynucleotide sequence
  source 1..220: mol_type = other DNA
ggtgaccttaatgctgctcgaccagaataaccgggagcacgtgattgacgccttcaggcccgacgtgacttcatcctcttttcagaggccagtcaacgacatgaacatcgcaagcggctgccccctcttctgccccgtctccaagatggaggcaaagaattcctacgtgcgggacgatgccatcttcatcaaggccattgtggacctgacagggctctaa

SEQ ID NO: 9030 - DNA, 121 bp, synthetic construct
  misc_feature 1..121: note = Description of artificial sequence: synthetic polynucleotide sequence
  source 1..121: mol_type = other DNA
gaatggtttgtctctgggatgatacttttctgacagtgcagcctgcagataacatctaacgaggggagaaggattatgtgagcagtggtggctgaggtctctctctctctctctctctttt

SEQ ID NO: 9031 - DNA, 240 bp, synthetic construct
  misc_feature 1..240: note = Description of artificial sequence: synthetic polynucleotide sequence
  source 1..240: mol_type = other DNA
ctcagaacacactctcctgcctctggaggccgggcctggtggctccctccatcccttcagggtgcgcaccggcctcggagcgcacggacgtggtcctggcggagaagaggctctcgcggcgcgtgtccagggtgtctctgggcacccggcggcagcccaaatattcccgcaggcgcagctggaattcccgggacgcaaagtaataaacaaacgggtccagacagttgttgaggcagctga

SEQ ID NO: 9032 - DNA, 480 bp, synthetic construct
  misc_feature 1..480: note = Description of artificial sequence: synthetic polynucleotide sequence
  source 1..480: mol_type = other DNA
gacacagcgtgagcttgtacacgtggtagtagctcttgccgtagaacaggcggctcacgatgtgcgccaggagcacgaagttgttgggggcgaagcaggtgacaaaggccagcaagaccaccgcggccaggcccaccgcgcgcctccgctgctcccggccgtgcgcctcctccgtgcgcaacagcttgaggatggtggccgtgtaacaagccacggtgatcacgaacgggatgaggaacagcaggatgaagatggtgaagaggaacacggcccacatggccacgctggggagcatcgtccacttgaggacgtcgaagcaggtgatgatgcccagggcgtgcaccgggtaggtgagatcggtgcgcgccagcggggacagggcggtcaggagcagcagccaggtccctgcacacgcggccaccgcgtaacgacggcggcgccagcgcttggagctgagcgggtacaggacccccaggaagc

SEQ ID NO: 9033 - DNA, 361 bp, synthetic construct
  misc_feature 1..361: note = Description of artificial sequence: synthetic polynucleotide sequence
  source 1..361: mol_type = other DNA
gctccacgctgatacaggtcatggtgaggatgctggaatacatgtttgcgtaaaaggccacggtcaccacgttgcaaagcagcaccccgaatacccagtggtggcggttgcaatggtagtagatttggaaaggcaacacgctggccagcatcaggtccgtgacgctcaggttgatcatgaagatgaccgacggggatctgggccccatgcgccggcacagcacccacagagagaagaggttgcccgggatgctgaccgccgccaccagcgagtacaccacgggcagggccaccgcgatcgccgggttccgcagcatctgcagcgtcgcgttgtccgggccggtgctgttcgggacctgcat

SEQ ID NO: 9034 - DNA, 121 bp, synthetic construct
  misc_feature 1..121: note = Description of artificial sequence: synthetic polynucleotide sequence
  source 1..121: mol_type = other DNA
agacgtgaaacagcttcaccgctatgtcctctccatttctgggctccttttctatcttatgtttgccccctactcacagcccttccccattaagaaccaacctccaaccgcatgccagttg

SEQ ID NO: 9035 - DNA, 121 bp, synthetic construct
  misc_feature 1..121: note = Description of artificial sequence: synthetic polynucleotide sequence
  source 1..121: mol_type = other DNA
ggttctgcaatgtacagacctgttgcatcatgcataccatttaaatttaacacctatatagatggaacttgtggctacacggaaaaatggagtgtttatgaatttgtgagcacgagactct

SEQ ID NO: 9036 - DNA, 121 bp, synthetic construct
  misc_feature 1..121: note = Description of artificial sequence: synthetic polynucleotide sequence
  source 1..121: mol_type = other DNA
agttctctctctgttctgcactatttttttcaaggatatttgtgtagtgagtgcccttagatggtagaggtaatgtccacatttatttgctttcctggataataaatataattcatcccag

SEQ ID NO: 9037 - DNA, 121 bp, synthetic construct
  misc_feature 1..121: note = Description of artificial sequence: synthetic polynucleotide sequence
  source 1..121: mol_type = other DNA
ctcatgtccacaccaccttgaagtataacaaagagacgcaacataatgagtgtgtttcgtgtatccagctcaacatagagaattgaaaacactgttctttcccataaactcactaaaagga

SEQ ID NO: 9038 - DNA, 121 bp, synthetic construct
  misc_feature 1..121: note = Description of artificial sequence: synthetic polynucleotide sequence
  source 1..121: mol_type = other DNA
aggcagctgatgtcaagataagctgattatcctagaatatccaagtgggtccatgatactgagaagcaggaaaatggtaatggaacaatcagtccagacaagccatgcaacttgggaaagg

SEQ ID NO: 9039 - DNA, 121 bp, synthetic construct
  misc_feature 1..121: note = Description of artificial sequence: synthetic polynucleotide sequence
  source 1..121: mol_type = other DNA
gtgtagttgaaacctcactgaggcctctcaggcatggacacctatcttcagagcaaatcgatgaaggtcccgcaaagcagcactccgaggaatctattttggggacgttttcacaaagagt

SEQ ID NO: 9040 - DNA, 121 bp, synthetic construct
  misc_feature 1..121: note = Description of artificial sequence: synthetic polynucleotide sequence
  source 1..121: mol_type = other DNA
aacgatcttcagcacacaggcttcatgccaaaacgattgacaacaggaaaaatatctttcggaaagcaagaaatgtaattttccccgttctttctatccagcctttcccttgggcagccac

SEQ ID NO: 9041 - DNA, 121 bp, synthetic construct
  misc_feature 1..121: note = Description of artificial sequence: synthetic polynucleotide sequence
  source 1..121: mol_type = other DNA
catggggactttcatgtttcctgtctcccttgccagatcaaatcaccccagctttgtcaacatgaaagctcctctaagacattagtgcatccctgagcaaactcattcaatttggcattat

SEQ ID NO: 9042 - DNA, 121 bp, synthetic construct
  misc_feature 1..121: note = Description of artificial sequence: synthetic polynucleotide sequence
  source 1..121: mol_type = other DNA
ttttttatgaagtgcaaacccaccttccagccatacactctctttccgagagtgattttacctgtctgagaatttccaggacacaagttgacacattgagcaacaatatcttacggtatct

SEQ ID NO: 9043 - DNA, 121 bp, synthetic construct
  misc_feature 1..121: note = Description of artificial sequence: synthetic polynucleotide sequence
  source 1..121: mol_type = other DNA
gattatggataattataattacaagaagcagctcattaaaaggggctggttttattgaggctctgctttatttctactggaataattttaggcacacagcagcatatcaaataggatgcat

SEQ ID NO: 9044 - DNA, 121 bp, synthetic construct
  misc_feature 1..121: note = Description of artificial sequence: synthetic polynucleotide sequence
  source 1..121: mol_type = other DNA
ctcaggattttgcatacattttaaataatattcagctaaacacgtaatcacatgtttctcatgtatttccaaaaatcccatatggttagaaatgcctgccaggtttctctgttttgataaa

SEQ ID NO: 9045 - DNA, 121 bp, synthetic construct
  misc_feature 1..121: note = Description of artificial sequence: synthetic polynucleotide sequence
  source 1..121: mol_type = other DNA
aagatacatgcttaattgtaggagtggtaaggagacttgtgtggctggactggagtcaggtaaggatggaaattaaagaggtaagtggggaactgcccagacagtacagtgtccatagaat

SEQ ID NO: 9046 - DNA, 121 bp, synthetic construct
  misc_feature 1..121: note = Description of artificial sequence: synthetic polynucleotide sequence
  source 1..121: mol_type = other DNA
tttgtttatgtatttacaaagtagtgtactagatactgtaggagctattgttctcaagtggctcaaaagcatgtccagagttgactacagagttaaagtttgtaccagaaggtcaagtcat

SEQ ID NO: 9047 - DNA, 121 bp, synthetic construct
  misc_feature 1..121: note = Description of artificial sequence: synthetic polynucleotide sequence
  source 1..121: mol_type = other DNA
cctccgcaaccatgtctgacaaacccgatatggctgagatcgagaaattcgataagtcgaaactgaagaagacagagacgcaagagaaaaatccactgccttccaaagaaagtgagctccg

SEQ ID NO: 9048 - DNA, 121 bp, synthetic construct
  misc_feature 1..121: note = Description of artificial sequence: synthetic polynucleotide sequence
  source 1..121: mol_type = other DNA
tcatctccctccatcttttttttttttttttttctggtcacagcgattgaacaggagaagcaagcaggcgaatcgtaatgaggcgtgcgccgccaatatgcactgtacattccacaagcat

SEQ ID NO: 9049 - DNA, 121 bp, synthetic construct
  misc_feature 1..121: note = Description of artificial sequence: synthetic polynucleotide sequence
  source 1..121: mol_type = other DNA
tggcttacatttaggctactctgtattgaatcagacactatttatcactttcaagttctaatttctgcatcgtgcatatggttatttaaacctatatagttcaatgaaaatgctcccatcc

SEQ ID NO: 9050 - DNA, 121 bp, synthetic construct
  misc_feature 1..121: note = Description of artificial sequence: synthetic polynucleotide sequence
  source 1..121: mol_type = other DNA
tgtagagagagaacttgttcctgtttttatagtataatagttggtatttttaattttttgtgatcaatttgcagttgaagttttttaaagataccgagatagcaaaaattaaaatggaagc

SEQ ID NO: 9051 - DNA, 121 bp, synthetic construct
  misc_feature 1..121: note = Description of artificial sequence: synthetic polynucleotide sequence
  source 1..121: mol_type = other DNA
agtatgaaaaggagttaaccatgttccagaatgattttgaaaaagcttgtcaagcaaaatctgaagctctcgttcttcgggaaaagagtacccttgaaagaattcacaagcaccaagaggt

SEQ ID NO: 9052 - DNA, 121 bp, synthetic construct
  misc_feature 1..121: note = Description of artificial sequence: synthetic polynucleotide sequence
  source 1..121: mol_type = other DNA
ttcaccattactcctggctgaaacccaaagtaacacatttaaacataacctcatgtgaacctaaaataaatgaatgaacgactaaattcatcaaaagtcccagtttcttctttaccaattt

SEQ ID NO: 9053 - DNA, 121 bp, synthetic construct
  misc_feature 1..121: note = Description of artificial sequence: synthetic polynucleotide sequence
  source 1..121: mol_type = other DNA
ctatccttgggtggcaaatgactccagcgacccttgctatttgggtgtcagtcctttccgttaagactagaaaagtagcctgtaatcccagcactttgggaggccgaggcgggcgaatgac

SEQ ID NO: 9054 - DNA, 121 bp, synthetic construct
  misc_feature 1..121: note = Description of artificial sequence: synthetic polynucleotide sequence
  source 1..121: mol_type = other DNA
cttctcataaaatatcctcatgtagcatcatatgtttcttatagactagcactcctcacgtgggatcaaaatgctctgcttactctgagttctctactgggctaaagtctcaaagatttgg

SEQ ID NO: 9055 - DNA, 121 bp, synthetic construct
  misc_feature 1..121: note = Description of artificial sequence: synthetic polynucleotide sequence
  source 1..121: mol_type = other DNA
tcactgccagtggtagactccctagtccacttctttccctgccttggcgaaccctaagcatcatcttgtgatgtggacatgataaaatggtggagtctccatcagcctgctacccttctac

SEQ ID NO: 9056 - DNA, 121 bp, synthetic construct
  misc_feature 1..121: note = Description of artificial sequence: synthetic polynucleotide sequence
  source 1..121: mol_type = other DNA
ggttgaaaaaggtggtaaggcagtttccatggaggtcaggcagcatgtgaatgacagctcgatgtgatagagtagtgaaagtacagaggctttggagctaggtagacatgcctgaattttg

SEQ ID NO: 9057 - DNA, 121 bp, synthetic construct
  misc_feature 1..121: note = Description of artificial sequence: synthetic polynucleotide sequence
  source 1..121: mol_type = other DNA
ttctctgcggtggatatgtggacgcatagaatgggagtggggtgggcattttttccacttttgtgagggagaaacaaagattacttgactgttgcttcaagcaaataacaaaggccttcag

SEQ ID NO: 9058 - DNA, 121 bp, synthetic construct
  misc_feature 1..121: note = Description of artificial sequence: synthetic polynucleotide sequence
  source 1..121: mol_type = other DNA
agattcatattcttatactttgttctgtgactcagttaagtttgttcaaaatgctatgatcctgataattcttgcttttaaagtttcttaggtgtgaccagagcttcataaatctaggact

SEQ ID NO: 9059 - DNA, 121 bp, synthetic construct
  misc_feature 1..121: note = Description of artificial sequence: synthetic polynucleotide sequence
  source 1..121: mol_type = other DNA
ccctgggacacctgacagcaaaaaatccctattaattaatatcaaagtttatttgcataagagataaacctttagtgtgttaagccattgagatttcagccttttgccattacatctcata

SEQ ID NO: 9060 - DNA, 121 bp, synthetic construct
  misc_feature 1..121: note = Description of artificial sequence: synthetic polynucleotide sequence
  source 1..121: mol_type = other DNA
tttaattgtgtttaaggtctgtataacatccaattgtacttgaactggtgtttggtctacgccatagatacaaatctggtaaatcttatcccagaaagtgaatggctccccaaatttttct

SEQ ID NO: 9061 - DNA, 121 bp, synthetic construct
  misc_feature 1..121: note = Description of artificial sequence: synthetic polynucleotide sequence
  source 1..121: mol_type = other DNA
accccttgatatagtcctcaaaggaatgcatacatatattcatcaaatggcatgtcttagaatgtttataacatcatttttttctaccaaatgcccatccacagtagagtatataatatac

SEQ ID NO: 9062 - DNA, 121 bp, synthetic construct
  misc_feature 1..121: note = Description of artificial sequence: synthetic polynucleotide sequence
  source 1..121: mol_type = other DNA
aaaaggaatttcagaacctgaagacatgtctttcaaaataacccagtcagccagaaaaagtaacagaataaaaaagaatgaagagagtctacatgatatgtagaataccatacagtgacca

SEQ ID NO: 9063 - DNA, 121 bp, synthetic construct
  misc_feature 1..121: note = Description of artificial sequence: synthetic polynucleotide sequence
  source 1..121: mol_type = other DNA
ccaatcatttactgatcagctctggagtgttagaaagcaaatggaacatccttgttttgtgaagtgttgaagcacaaaagggtattgatctgttgccacgttacattgccgattcatgtct

SEQ ID NO: 9064 - DNA, 121 bp, synthetic construct
  misc_feature 1..121: note = Description of artificial sequence: synthetic polynucleotide sequence
  source 1..121: mol_type = other DNA
cttcattatcctccttgtcattttcctaatctggagatgcttcctaagaaacaaaactcgtagacagacagtgactgaaggccacattcctttccctcagcaccttaatattatcacccca

SEQ ID NO: 9065 - DNA, 121 bp, synthetic construct
  misc_feature 1..121: note = Description of artificial sequence: synthetic polynucleotide sequence
  source 1..121: mol_type = other DNA
caccagatgaagtgtttgacagcagtggattgtctccaggctttctgggatatgtagttgggcgctcagattccgtctctactcgcctgtccaattgtgatcccccgccaacctatgagga

SEQ ID NO: 9066 - DNA, 121 bp, synthetic construct
  misc_feature 1..121: note = Description of artificial sequence: synthetic polynucleotide sequence
  source 1..121: mol_type = other DNA
gagtgataggaggagtttctggcatctggactgaagtcatggtgccatttgacctttaatgcagacttcttgacttccattgctccagcccttccaattttgtgagtaccttatttcctgc

SEQ ID NO: 9067 - DNA, 121 bp, synthetic construct
  misc_feature 1..121: note = Description of artificial sequence: synthetic polynucleotide sequence
  source 1..121: mol_type = other DNA
gtgacagagcaagaccctgtctcaagaaaaaaagagagagaagtattaagggcctaatcgagggcaggactggtaggaatataaacaaagaccaatccatttgagccacattgtgcaagga

SEQ ID NO: 9068 - DNA, 121 bp, synthetic construct
  misc_feature 1..121: note = Description of artificial sequence: synthetic polynucleotide sequence
  source 1..121: mol_type = other DNA
gtttttgcttgcatcccattggccagaatttagtctcatggccacaccctggcatttagagtctcactaggctattggctggaggctgtccttagctccttgaggccacgtgggatttccc

SEQ ID NO: 9069 - DNA, 121 bp, synthetic construct
  misc_feature 1..121: note = Description of artificial sequence: synthetic polynucleotide sequence
  source 1..121: mol_type = other DNA
agcagcggaagactccgagttctcggtactcttcagggatgagtcatgtggcagtggaaaatgcgctcgggctggaccagcaggtgagccgcaagaaccccaccgggctggctgctgcgtg

SEQ ID NO: 9070 - DNA, 121 bp, synthetic construct
  misc_feature 1..121: note = Description of artificial sequence: synthetic polynucleotide sequence
  source 1..121: mol_type = other DNA
catggggtgctaaccatctcactctcttctagtttgctggcctagacctgaactcttcagataatcagagtggaggaagtacagccagcagtaagtacaacatcttgtgggtttattgaat

SEQ ID NO: 9071 - DNA, 121 bp, synthetic construct
  misc_feature 1..121: note = Description of artificial sequence: synthetic polynucleotide sequence
  source 1..121: mol_type = other DNA
catttaattaattttatatatatatatatttttttagaagggcgctatattcctcctcatttaaggaaccgagaagctactaaaggtaggtcctcacaagtaacttcgtaggtctattttt

SEQ ID NO: 9072 - DNA, 134 bp, synthetic construct
  misc_feature 1..134: note = Description of artificial sequence: synthetic polynucleotide sequence
  source 1..134: mol_type = other DNA
ggtttctacgataaagacagttcagggtggagttctagcaaagataaggatgcgtatagcagttttggatctcgtagtgattcaagagggaagtctagcttcttcagtgatcgtggaagtggatcaaggggaag

SEQ ID NO: 9073 - DNA, 160 bp, synthetic construct
  misc_feature 1..160: note = Description of artificial sequence: synthetic polynucleotide sequence
  source 1..160: mol_type = other DNA
ggtttgatgatcgtggacggagtgattacgatggcattggcagccgtggtgacagaagtggctttggcaaatttgaacgtggtggaaacagtcgctggtgtgacaaatcagatgaagatgattggtcaaaaccactcccaccaagtgaacgcttggaaca

SEQ ID NO: 9074 - DNA, 121 bp, synthetic construct
  misc_feature 1..121: note = Description of artificial sequence: synthetic polynucleotide sequence
  source 1..121: mol_type = other DNA
tttgatttgagggaactcttttctggaggcaacactgggattaattttgagaaatacgatgacattccagttgaggcaacaggcaacaactgtcctccacatattgaaagtgtgagtattt

SEQ ID NO: 9075 - DNA, 137 bp, synthetic construct
  misc_feature 1..137: note = Description of artificial sequence: synthetic polynucleotide sequence
  source 1..137: mol_type = other DNA
gttcagtgatgttgagatgggagaaattatcatgggaaacattgagcttactcgttatactcgcccaactccagtgcaaaagcatgctattcctattatcaaagagaaaagagacttgatggcttgtgcccaaacag

SEQ ID NO: 9076 - DNA, 121 bp, synthetic construct
  misc_feature 1..121: note = Description of artificial sequence: synthetic polynucleotide sequence
  source 1..121: mol_type = other DNA
ttgtttgtttttgaacagggtctggaaaaactgcagcatttctgttgcccatcttgagtcagatttattcagatggtccaggcgaggctttgagggccatgaaggtagatgtttctttata

SEQ ID NO: 9077 - DNA, 121 bp, synthetic construct
  misc_feature 1..121: note = Description of artificial sequence: synthetic polynucleotide sequence
  source 1..121: mol_type = other DNA
ttatttcttaggaaaatggaaggtatgggcgccgcaaacaatacccaatctccttggtattagcaccaacgagagagttggcagtacagatctacgaggaagccagaaaagtaagtatgag

SEQ ID NO: 9078 - DNA, 162 bp, synthetic construct
  misc_feature 1..162: note = Description of artificial sequence: synthetic polynucleotide sequence
  source 1..162: mol_type = other DNA
gttttcataccgatctagagttcgtccttgcgtggtttatggtggtgccgatattggtcagcagattcgagacttggaacgtggatgccatttgttagtagccactccaggacgtctagtggatatgatggaaagaggaaagattggattagacttttgcaa

SEQ ID NO: 9079 - DNA, 146 bp, synthetic construct
  misc_feature 1..146: note = Description of artificial sequence: synthetic polynucleotide sequence
  source 1..146: mol_type = other DNA
gatacttggtgttagatgaagctgatcggatgttggatatggggtttgagcctcagattcgtagaatagtcgaacaagatactatgcctccaaagggtgtccgccacactatgatgtttagtgctacttttcctaaggaaatacag

SEQ ID NO: 9080 - DNA, 146 bp, synthetic construct
  misc_feature 1..146: note = Description of artificial sequence: synthetic polynucleotide sequence
  source 1..146: mol_type = other DNA
gatgctggctcgtgatttcttagatgaatatatcttcttggctgtaggaagagttggctctacctctgaaaacatcacacagaaagtagtttgggtggaagaatcagacaaacggtcatttctgcttgacctcctaaatgcaacag

SEQ ID NO: 9081 - DNA, 183 bp, synthetic construct
  misc_feature 1..183: note = Description of artificial sequence: synthetic polynucleotide sequence
  source 1..183: mol_type = other DNA
ggcaaggattcactgaccttagtgtttgtggagaccaaaaagggtgcagattctctggaggatttcttataccatgaaggatacgcatgtaccagcatccatggagaccgttctcagagggatagagaagaggcccttcaccagttccgctcaggaaaaagcccaattttagtggctacagca

SEQ ID NO: 9082 - DNA, 121 bp, synthetic construct
  misc_feature 1..121: note = Description of artificial sequence: synthetic polynucleotide sequence
  source 1..121: mol_type = other DNA
aggtagcagcaagaggactggacatttcaaatgtgaaacatgttatcaattttgacttgccaagtgatattgaagaatatgtacatcgtattggtcgtacgggacgtgtaggaaaccttgg

SEQ ID NO: 9083 - DNA, 155 bp, synthetic construct
  misc_feature 1..155: note = Description of artificial sequence: synthetic polynucleotide sequence
  source 1..155: mol_type = other DNA
ggcctggcaacctcattctttaacgagaggaacataaatattactaaggatttgttggatcttcttgttgaagctaaacaagaagtgccgtcttggttagaaaacatggcttatgaacaccactacaagggtagcagtcgtggacgttctaagag

SEQ ID NO: 9084 - DNA, 141 bp, synthetic construct
  misc_feature 1..141: note = Description of artificial sequence: synthetic polynucleotide sequence
  source 1..141: mol_type = other DNA
gtagcagatttagtggagggtttggtgccagagactaccgacaaagtagcggtgccagcagttccagcttcagcagcagccgcgcaagcagcagccgcagtggcggaggtggccacggtagcagcagaggatttggtggag

SEQ ID NO: 9085 - DNA, 121 bp, synthetic construct
  misc_feature 1..121: note = Description of artificial sequence: synthetic polynucleotide sequence
  source 1..121: mol_type = other DNA
tctttttaaatctctcattaggtggctatggaggcttttacaacagtgatggatatggaggaaattataactcccagggggttgactggtggggtaactgagcctgctttgcagtaggtca

SEQ ID NO: 9086 - DNA, 121 bp, synthetic construct
  misc_feature 1..121: note = Description of artificial sequence: synthetic polynucleotide sequence
  source 1..121: mol_type = other DNA
tgtcttgaagcttatgtgccacttcagccacagtggagtggaatagagcaccaagtagtcctaaggtccttaactccaggccctggcttccagatggcatctctggtctcccccttggccc

SEQ ID NO: 9087 - DNA, 162 bp, synthetic construct
  misc_feature 1..162: note = Description of artificial sequence: synthetic polynucleotide sequence
  source 1..162: mol_type = other DNA
catgaaatcctgcggagtgtcgctcgctaccgccgccgctgccgccgccgctttcggtgatgaggaaaagaaaatggcggcgggaaaagcgagcggcgagagcgaggaggcgtcccccagcctgacagccgaggagagggaggcgctcggcggactggacag

SEQ ID NO: 9088 - DNA, 121 bp, synthetic construct
  misc_feature 1..121: note = Description of artificial sequence: synthetic polynucleotide sequence
  source 1..121: mol_type = other DNA
taacgagtaaactgtgtctgtctccacagccgcctctttgggttcgtgagatttcatgaagatggcgccaggacgaaggccctactgggcaaggtaaggcagctgcgagtcggagcgcgga

SEQ ID NO: 9089 - DNA, 121 bp, synthetic construct
  misc_feature 1..121: note = Description of artificial sequence: synthetic polynucleotide sequence
  source 1..121: mol_type = other DNA
ttctaggctgttcgctgctatgaatctctaatcttaaaagctgaaggaaaagtggagtctgatttcttttgtcaattaggtcacttcaacctcttattggaagattatccaaaaggtaatt

SEQ ID NO: 9090 - DNA, 121 bp, synthetic construct
  misc_feature 1..121: note = Description of artificial sequence: synthetic polynucleotide sequence
  source 1..121: mol_type = other DNA
agacataattatgactcataattattttcctttcagcattatctgcataccagaggtactacagtttacagtctgactactggaaggttagtgtacatttgcatgctgatttcatgtttgt

SEQ ID NO: 9091 - DNA, 121 bp, synthetic construct
  misc_feature 1..121: note = Description of artificial sequence: synthetic polynucleotide sequence
  source 1..121: mol_type = other DNA
ttcctaaaaatctttttcccttcctttacagaatgctgcctttttatatggtcttggtttggtctacttccattataatgcatttcagtggtaagttgacataaaaccagtaattcagtca

SEQ ID NO: 9092 - DNA, 121 bp, synthetic construct
  misc_feature 1..121: note = Description of artificial sequence: synthetic polynucleotide sequence
  source 1..121: mol_type = other DNA
ggcaattaaagcatttcaggaggtgctttatgttgatcccagcttttgtcgagccaaggaaattcatttacgacttgggcttatgttcaaagtgaacacagactatgagtctagtttaaag

SEQ ID NO: 9093 - DNA, 121 bp, synthetic construct
  misc_feature 1..121: note = Description of artificial sequence: synthetic polynucleotide sequence
  source 1..121: mol_type = other DNA
gactgcattaattttctcactctcgtcttgcagcattttcagttagctttggttgactgtaatccctgcactttgtccaatgctgaaagtaagtattattaagtactgtagttttctacat

SEQ ID NO: 9094 - DNA, 121 bp, synthetic construct
  misc_feature 1..121: note = Description of artificial sequence: synthetic polynucleotide sequence
  source 1..121: mol_type = other DNA
ctgtattgttactgatttttttgtctttcctcatcctttgcagttcaatttcacattgcccacttatatgaaacccaggtaagtattttaacttattctatttaaaacaaaagcaaacaaa

SEQ ID NO: 9095 - DNA, 121 bp, synthetic construct
  misc_feature 1..121: note = Description of artificial sequence: synthetic polynucleotide sequence
  source 1..121: mol_type = other DNA
tttctgttctttagaggaaatatcattctgcaaaagaagcttatgaacaacttttgcagacagagaatctttctgcacaagtaaaagcaactgtcttacaacagttaggtatgtaatagta

SEQ ID NO: 9096 - DNA, 121 bp, synthetic construct
  misc_feature 1..121: note = Description of artificial sequence: synthetic polynucleotide sequence
  source 1..121: mol_type = other DNA
ggatgcatcacactgtagatctcctgggagataaagccaccaaggaaagctatgctattcagtatctccaaaagtccttggaagcagatcctaattctggccagtcctggtatttcctcgg

SEQ ID NO: 9097 - DNA, 121 bp, synthetic construct
  misc_feature 1..121: note = Description of artificial sequence: synthetic polynucleotide sequence
  source 1..121: mol_type = other DNA
tcccttctcaggtgctattcaagtattgggaaagttcaggatgcctttatatcttacaggcagtctattgataaatcagaagcaagtgcagatacatggtgttcaatagggtaagcctttg

SEQ ID NO: 9098 - DNA, 221 bp, synthetic construct
  misc_feature 1..221: note = Description of artificial sequence: synthetic polynucleotide sequence
  source 1..221: mol_type = other DNA
gtgtgctatatcagcagcaaaatcagcccatggatgctttacaggcctatatttgtgctgtacaattggaccatggccatgctgcagcctggatggacctaggcactctctatgaatcctgcaaccagcctcaggatgccattaaatgctacttaaatgcaactagaagcaaaagttgtagtaatacctctgcacttgcagcacgaattaagtatttacag

SEQ ID NO: 9099 - DNA, 136 bp, synthetic construct
  misc_feature 1..136: note = Description of artificial sequence: synthetic polynucleotide sequence
  source 1..136: mol_type = other DNA
ggctcagttgtgtaaccttccacaaggtagtctacagaataaaactaaattacttcctagtattgaggaggcgtggagcctaccaattcccgcagagcttacctccaggcagggtgccatgaacacagcacagcag

SEQ ID NO: 9100 - DNA, 157 bp, synthetic construct
  misc_feature 1..157: note = Description of artificial sequence: synthetic polynucleotide sequence
  source 1..157: mol_type = other DNA
ggcatgtaaacctcatcatccaaatactgaacctgtattaggcctcagtcaaacaccaatttcacagcaatccttgccactacacatgattccttctagccaagtagatgacctgtccagtcctgccaagaggaaaagaacatctagtccaacaaag

SEQ ID NO: 9101 - DNA, 121 bp, synthetic construct
  misc_feature 1..121: note = Description of artificial sequence: synthetic polynucleotide sequence
  source 1..121: mol_type = other DNA
cgattttcctcagaatacttctgacaattggagtggtggacatgctgtgtcacatcctccagtacagcaacaagctcattcatggtgtttgacaccacagaaattacaggtatgtaagatg

SEQ ID NO: 9102 - DNA, 121 bp, synthetic construct
  misc_feature 1..121: note = Description of artificial sequence: synthetic polynucleotide sequence
  source 1..121: mol_type = other DNA
cttcttctagcatttggaacagctccgcgcaaatagaaataatttaaatccagcacagaaactgatgctggaacagctggaaagtcagtttgtcttaatgcaacaacaccaagtgtgtata

SEQ ID NO: 9103 - DNA, 397 bp, synthetic construct
  misc_feature 1..397: note = Description of artificial sequence: synthetic polynucleotide sequence
  source 1..397: mol_type = other DNA
gatgagaccaacaggagttgcacaggtacgatctactggaattcctaatgggccaacagctgactcatcactgcctacaaactcagtctctggccagcagccacagcttgctctgaccagagtgcctagcgtctctcagcctggagtccgtcctgcctgccctgggcagcctttggccaatggacccttttctgcaggccatgttccctgtagcacatcaagaacgctgggaagtacagacactattttgataggcaataatcatataacaggaagtggaagtaatggaaacgtgccttacctgcagcgaaacgcactcactctacctcataaccgcacaaacctgaccagcagcgcagaggagccgtggaaaaaccaactatctaactccactcag

SEQ ID NO: 9104 - DNA, 330 bp, synthetic construct
  misc_feature 1..330: note = Description of artificial sequence: synthetic polynucleotide sequence
  source 1..330: mol_type = other DNA
ggggcttcacaaaggtcagagttcacattcggcaggtcctaatggtgaacgacctctctcttccactgggccttcccagcatctccaggcagctggctctggtattcagaatcagaacggacatcccaccctgcctagcaattcagtaacacagggggctgctctcaatcacctctcctctcacactgctacctcaggtggacaacaaggcattaccttaaccaaagagagcaagccttcaggaaacatattgacggtgcctgaaacaagcaggcacactggagagacacctaacagcactgccagtgtcgagggacttcctaatcatgt

SEQ ID NO: 9105 - DNA, 450 bp, synthetic construct
  misc_feature 1..450: note = Description of artificial sequence: synthetic polynucleotide sequence
  source 1..450: mol_type = other DNA
ccatcagatgacggcagatgctgtttgcagtcctagccatggagattctaagtcaccaggtttactaagttcagacaatcctcagctctctgccttgttgatgggaaaagccaataacaatgtgggtactggaacctgtgacaaagtcaataacatccacccagctgttcatacaaagactgataactctgttgcctcttcaccatcttcagccatttcaacagcaacaccttctccaaaatccactgagcagacaaccacaaacagtgttaccagccttaacagccctcacagtgggctacacacaattaatggagaagggatggaagaatctcagagccccatgaaaacagatctgcttctggttaaccacaaacctagtccacagatcataccatcaatgtctgtgtccatataccccagctcagcagaagttctgaaggcatgcag

SEQ ID NO: 9106 - DNA, 121 bp, synthetic construct
  misc_feature 1..121: note = Description of artificial sequence: synthetic polynucleotide sequence
  source 1..121: mol_type = other DNA
ctaggtaaaaatggcttatctaacagtagcattttgttggataaatgtccacctccaagaccaccatcttcaccataccctcccttgccaaaggacaagttgaatccacctacacctagta

SEQ ID NO: 9107 - DNA, 121 bp, synthetic construct
  misc_feature 1..121: note = Description of artificial sequence: synthetic polynucleotide sequence
  source 1..121: mol_type = other DNA
ttttacagttggaaaataaacgtgatgctttctttcctccattacatcaattttgtacaaatccgaacaaccctgttacagtaatacgtggccttgctggagctcttaagttaggtaagcc

SEQ ID NO: 9108 - DNA, 207 bp, synthetic construct
  misc_feature 1..207: note = Description of artificial sequence: synthetic polynucleotide sequence
  source 1..207: mol_type = other DNA
gacctgggacttttctctactaaaactttggtggaagctaacaatgaacatatggtagaagtgaggacacagttgttgcagccagcagatgaaaactgggatcccactggaacaaagaaaatctggcattgtgaaagtaatagatctcatactacaattgctaaatatgcacagtaccaggcctcctcattccaggaatcattgaga

SEQ ID NO: 9109 - DNA, 121 bp, synthetic construct
  misc_feature 1..121: note = Description of artificial sequence: synthetic polynucleotide sequence
  source 1..121: mol_type = other DNA
actagactgctttttgcttaatctataggaagaaaatgaaaaaagaagtcatcataaagaccactcagatagtgaatctacatcgtcagataagtaagtcatttttaatgtccacttagta

SEQ ID NO: 9110 - DNA, 121 bp, synthetic construct
  misc_feature 1..121: note = Description of artificial sequence: synthetic polynucleotide sequence
  source 1..121: mol_type = other DNA
taatactgtgtctcttttttaagttctgggaggaggaggaaaggaccctttaaaaccataaagtttgggaccaatattgacctatctgatgacaaaaagtaagtccttgtagtaatatttc

SEQ ID NO: 9111 - DNA, 150 bp, synthetic construct
  misc_feature 1..150: note = Description of artificial sequence: synthetic polynucleotide sequence
  source 1..150: mol_type = other DNA
ggtggaagttgcagctacatgagctgactaaacttcctgcttttgtgcgtgtcgtatcagcaggaaatcttctaagccatgttggtcataccatattgggcatgaacacagttcaactatacatgaaagttccagggagcagaacaccag

SEQ ID NO: 9112 - DNA, 121 bp, synthetic construct
  misc_feature 1..121: note = Description of artificial sequence: synthetic polynucleotide sequence
  source 1..121: mol_type = other DNA
caggtcatcaggaaaataacaacttctgttcagttaacataaatattggcccaggtgactgtgaatggtttgttgttcctgaaggttactggggtgttctgaatgacttctgtgaaaagta

SEQ ID NO: 9113 - DNA, 189 bp, synthetic construct
  misc_feature 1..189: note = Description of artificial sequence: synthetic polynucleotide sequence
  source 1..189: mol_type = other DNA
gaaataatttgaatttcctaatgggttcttggtggcccaatcttgaagatctttatgaagcaaatgttccagtgtataggtttattcagcgacctggagatttggtctggataaatgcaggcactgttcattgggttcaggctattggctggtgcaacaacattgcttggaatgttggtccacttacag

SEQ ID NO: 9114 - DNA, 143 bp, synthetic construct
  misc_feature 1..143: note = Description of artificial sequence: synthetic polynucleotide sequence
  source 1..143: mol_type = other DNA
gcctgccagtataaattggcagtggaacggtacgaatggaacaaattgcaaagtgtgaagtcaatagtacccatggttcatctttcctggaatatggcacgaaatatcaaggtctcagatccaaagctttttgaaatgattaa

SEQ ID NO: 9115 - DNA, 121 bp, synthetic construct
  misc_feature 1..121: note = Description of artificial sequence: synthetic polynucleotide sequence
  source 1..121: mol_type = other DNA
ttgtcttctaagaactctgaagcaatgtcagacattgagggaagctctcattgctgcaggaaaagagattatatggcatgggcggacaaaagaagaaccagctcattactgtagcatttgt

SEQ ID NO: 9116 - DNA, 172 bp, synthetic construct
  misc_feature 1..172: note = Description of artificial sequence: synthetic polynucleotide sequence
  source 1..172: mol_type = other DNA
ggtggaggtttttgatctgctttttgtcactaatgagagtaattcacgaaagacctacatagtacattgccaagattgtgcacgaaaaacaagcggaaacttggaaaactttgtggtgctagaacagtacaaaatggaggacctgatgcaagtctatgaccaatttacatta

SEQ ID NO: 9117 - DNA, 121 bp, synthetic construct
  misc_feature 1..121: note = Description of artificial sequence: synthetic polynucleotide sequence
  source 1..121: mol_type = other DNA
ttaacaatttgtatatcaaaataacctaccttacttttattttcaggctcctccattaccatccgcctcatcttgatattgttccatggacattaaatgagaccttttctgctattcagga

SEQ ID NO: 9118 - DNA, 121 bp, synthetic construct
  misc_feature 1..121: note = Description of artificial sequence: synthetic polynucleotide sequence
  source 1..121: mol_type = other DNA
gctgggattacagacgtgagcgactgcgcccagcctctccaactttaaaataaagaaaacgtcagctggaccacaaacctaaaatattcttaaagcacagacgtccttaaatgaaaacccc

SEQ ID NO: 9119 - DNA, 121 bp, synthetic construct
  misc_feature 1..121: note = Description of artificial sequence: synthetic polynucleotide sequence
  source 1..121: mol_type = other DNA
gtttgtgtgatctggcaggagaggatcagaaggcaatcagggctaagggtaaaattttaggccattgcgtattgagtttttccatcagtttagcaagctttattgtttgtttggtttggtt

SEQ ID NO: 9120 - DNA, 165 bp, synthetic construct
  misc_feature 1..165: note = Description of artificial sequence: synthetic polynucleotide sequence
  source 1..165: mol_type = other DNA
cttagggtagcaaggaccaggccaaaggggcagggcctcctttggaggggttgaggggtacatcctcggctggtgtttgcatccaggggtccagcaggatctcttccagtgagggtcgggaagaaggtttgggggccaggcaccggcggattagggcacagcagt

SEQ ID NO: 9121 - DNA, 178 bp, synthetic construct
  misc_feature 1..178: note = Description of artificial sequence: synthetic polynucleotide sequence
  source 1..178: mol_type = other DNA
cctggggagacatgggctgggaagtggagctcagcttccagaatctcctggtccctctcaaagggaatgtccccacacaccatgtcatagaggaggatgcccagtgaccagacagtggccgggagtgcatggtactggtgtcgagagatccactctggggggctgtacacccttgtcc

SEQ ID NO: 9122 - DNA, 374 bp, synthetic construct
  misc_feature 1..374: note = Description of artificial sequence: synthetic polynucleotide sequence
  source 1..374: mol_type = other DNA
ccatcaaagtcagtgtagggttcatcatgaagcagggcaccagaaccaaaatcaatgagtttggcacagccacggcgtaggtctatcaggatgttctcatccttgatgtcacgatggacaactccacgggaatggcagtgctggatggctgccactacttggccaaagaagcagcggcttgggccttcacccagtgggcccttctctgtgatatagtcaaagagatcctgggcgggcaaaggccgctcgaggaccagcatgaagccctcctgtgtctcaaaccagtcaagcaggcggatcacgccagggtgcccaccacctgcacccactttccatagcagtgcgacttcgagtgggcatgtgactgagtctga

SEQ ID NO: 9123 - DNA, 121 bp, synthetic construct
  misc_feature 1..121: note = Description of artificial sequence: synthetic polynucleotide sequence
  source 1..121: mol_type = other DNA
gtaggtaggttaggaagggctccgaaggtactcaccaagggggaccagcccagcacacgattccggggaatcactttgatggccacctggagaagaaggccgtgataaggaggccagcagg

SEQ ID NO: 9124 - DNA, 121 bp, synthetic construct
  misc_feature 1..121: note = Description of artificial sequence: synthetic polynucleotide sequence
  source 1..121: mol_type = other DNA
ggatacctggagtcgatctgtgaggcggtgtcctgcgaagacggtgccaaagccccccttacccaggagggggccgagtcgatactcggcctcgaacgcttcccgatccttgcctcctacg

SEQ ID NO: 9125 - DNA, 121 bp, synthetic construct
  misc_feature 1..121: note = Description of artificial sequence: synthetic polynucleotide sequence
  source 1..121: mol_type = other DNA
tctggttgcagtaggggaggatgtactcacctggcggcggcgtgggggtcccggggggcgcgggaggcccctgtagaggcttggtcaacatggaggtggcgctgcgcagattgagcccact

SEQ ID NO: 9126 - DNA, 121 bp, synthetic construct
  misc_feature 1..121: note = Description of artificial sequence: synthetic polynucleotide sequence
  source 1..121: mol_type = other DNA
gttttgtacacacagcccagaatgtctccaggcatacgctgctgctttcactcagaaagcaaagtttgtacctggtaataaacattggggtctgaggggtttgcagttaattggttggatc

SEQ ID NO: 9127 - DNA, 121 bp, synthetic construct
  misc_feature 1..121: note = Description of artificial sequence: synthetic polynucleotide sequence
  source 1..121: mol_type = other DNA
atctacagaactgtgagctaacaaataggtggtgttttaaagctgctaagtttgtgctagtgtgttacaacagtcatagaaagctaatacagaagccttagagttttagtcatgtgaggaa

SEQ ID NO: 9128 - DNA, 121 bp, synthetic construct
  misc_feature 1..121: note = Description of artificial sequence: synthetic polynucleotide sequence
  source 1..121: mol_type = other DNA
cccacattcttgttctgtatttttatttggtgcattgactttcctagatcactatctctaggtttctgattctgtcttggtagtctaactgcaattcaagatccctttgtttatttgattt

SEQ ID NO: 9129 - DNA, 121 bp, synthetic construct
  misc_feature 1..121: note = Description of artificial sequence: synthetic polynucleotide sequence
  source 1..121: mol_type = other DNA
catgtcagacacggacagcgacgaagattccgctggaggcggcccattttctttagcgggtttccttttcggcaacatcaatggagccgggcagctggagggggaaagcgtcttggatgat

SEQ ID NO: 9130 - DNA, 121 bp, synthetic construct
  misc_feature 1..121: note = Description of artificial sequence: synthetic polynucleotide sequence
  source 1..121: mol_type = other DNA
caggaatgtaagaagcacttggcaggcttgggggctttggggctgggcagcctgatcactgaactcacggcaaatgaagaattgaccgggactgacggtgccttggtaaatgatgaaggtg

SEQ ID NO: 9131 - DNA, 121 bp, synthetic construct
  misc_feature 1..121: note = Description of artificial sequence: synthetic polynucleotide sequence
  source 1..121: mol_type = other DNA
agggtgggttaggagtacagaagatgctgtggactattcagacatcaatgaggtggcagaagatgaaagccgaagataccagcagacgatggggagcttgcagcccctttgccactcaggt

SEQ ID NO: 9132 - DNA, 121 bp, synthetic construct
  misc_feature 1..121: note = Description of artificial sequence: synthetic polynucleotide sequence
  source 1..121: mol_type = other DNA
gattatgatgaagatgactatgatgctgattgtgaagacattgattgcaagttgatgcctcctccacctccacccccgggaccaatgaagaaggataaggaccaggattctattactggtg

SEQ ID NO: 9133 - DNA, 121 bp, synthetic construct
  misc_feature 1..121: note = Description of artificial sequence: synthetic polynucleotide sequence
  source 1..121: mol_type = other DNA
gtgtctgaaaatggagaaggcatcatcttgccctccatcattgccccttcctctttggcctcagagaaagtggacttcagtagttcctctgactcagaatctgagatgggacctcaggaag

SEQ ID NO: 9134 - DNA, 121 bp, synthetic construct
  misc_feature 1..121: note = Description of artificial sequence: synthetic polynucleotide sequence
  source 1..121: mol_type = other DNA
aacacaggcagaatctgaagatggaaagctgacccttccattggctgggattatgcagcatgatgccaccaagctgttgccaagtgtcacagaactttttccagaatttcgacctggaaag

SEQ ID NO: 9135 - DNA, 220 bp, synthetic construct
  misc_feature 1..220: note = Description of artificial sequence: synthetic polynucleotide sequence
  source 1..220: mol_type = other DNA
ggtgttacgttttctacgtctttttggaccagggaagaatgtcccatctgtttggcggagtgctcggagaaagaggaagaagaagcaccgtgagctgatacaggaagagcagatccaggaggtggagtgctcagtagaatcagaagtcagccagaagtctttgtggaactacgactacgctccaccaccacctccagagcagtgtctctctgatgatgaa

SEQ ID NO: 9136 - DNA, 220 bp, synthetic construct
  misc_feature 1..220: note = Description of artificial sequence: synthetic polynucleotide sequence
  source 1..220: mol_type = other DNA
gatcacgatgatggctcctgtggagtccaaattttcccaatcaactggagatatagataaagtgacagataccaaaccaagagtggctgagtggcgttatgggcctgcccgactgtggtatgatatgctgggtgtccctgaagatggcagtgggtttgactatggcttcaaactgagaaagacagaacatgaacctgtgataaaatctagaatgatagag

SEQ ID NO: 9137 - DNA, 209 bp, synthetic construct
  misc_feature 1..209: note = Description of artificial sequence: synthetic polynucleotide sequence
  source 1..209: mol_type = other DNA
ggaatttaggaaacttgaggaaaacaatggcactgatcttctggctgatgaaaacttcctgatggtgacacagctgcattgggaggatgatatcatctgggatggggaggatgtcaaacacaaagggacaaaacctcagcgtgcaagcctggcaggctggcttccttctagcatgactaggaatgcgatggcttacaatgttcagcaag

SEQ ID NO: 9138 - DNA, 178 bp, synthetic construct
  misc_feature 1..178: note = Description of artificial sequence: synthetic polynucleotide sequence
  source 1..178: mol_type = other DNA
ggttttgcagccactcttgatgatgacaaaccttggtactccatttttcccattgacaatgaggatctggtatatggacgctgggaggacaatatcatttgggatgctcaggccatgccccggctgttggaacctcctgttttgacacttgatcccaatgatgagaacctcattttgg

SEQ ID NO: 9139 - DNA, 121 bp, synthetic construct
  misc_feature 1..121: note = Description of artificial sequence: synthetic polynucleotide sequence
  source 1..121: mol_type = other DNA
ttcctgatgagaaggaagaggccacctctaactccccctccaaggagagtaagaaggaatcatctctgaagaagagtcgaattctcttagggaaaacaggagtcatcaaggaggaaccaca

SEQ ID NO: 9140 - DNA, 121 bp, synthetic construct
  misc_feature 1..121: note = Description of artificial sequence: synthetic polynucleotide sequence
  source 1..121: mol_type = other DNA
tcattagaacatgtctcagccagaagtgaaagatccatggaatctctccaatgatgagtattattatcccaagcaacagggtcttcgaggcacctttggagggaatattatccaggtacaa

SEQ ID NO: 9141 - DNA, 175 bp, synthetic construct
  misc_feature 1..175: note = Description of artificial sequence: synthetic polynucleotide sequence
  source 1..175: mol_type = other DNA
gcattcaattcctgctgtggaattacggcagcccttctttcccacccacatggggcccatcaaactccggcagttccatcgcccacctctgaaaaagtactcatttggtgcactttctcagccaggtccccactcagtccaacctttgctaaagcacatcaaaaaaaaggccaag

SEQ ID NO: 9142 - DNA, 175 bp, synthetic construct
  misc_feature 1..175: note = Description of artificial sequence: synthetic polynucleotide sequence
  source 1..175: mol_type = other DNA
gatgagagaacaagagaggcaagcttcaggtggtggagagatgttttttatgcgcacacctcaggacctcacaggcaaagatggtgatcttattcttgcagaatatagtgaggaaaatggacccttaatgatgcaggttggcatggcaaccaagataaagaactattataaacgg

SEQ ID NO: 9143 - DNA, 121 bp, synthetic construct
  misc_feature 1..121: note = Description of artificial sequence: synthetic polynucleotide sequence
  source 1..121: mol_type = other DNA
ccttatagaaacctggaaaagatcctggagcaccagattgtaaatatggggaaactgtttactgccatacatctcctttcctgggttctctccatcctggccaattgctgcaagtgaggaa

SEQ ID NO: 9144 - DNA, 202 bp, synthetic construct
  misc_feature 1..202: note = Description of artificial sequence: synthetic polynucleotide sequence
  source 1..202: mol_type = other DNA
ggcatttgagaacaacctttttcgtgctccaatttatcttcataagatgccagaaactgatttcttgatcattcggacaagacagggttactatattcgggaattagtggatatttttgtggttggccagcagtgtcccttgtttgaagttcctgggcctaactccaaaagggccaatacgcatattcgagactttctacag

SEQ ID NO: 9145 - DNA, 143 bp, synthetic construct
  misc_feature 1..143: note = Description of artificial sequence: synthetic polynucleotide sequence
  source 1..143: mol_type = other DNA
ggtttttatttaccgccttttctggaaaagtaaagatcggccacggaggatacgaatggaagatataaaaaaagcctttccttcccattcagaaagcagcatccggaagaggctaaagctctgcgctgacttcaaacgcacag

SEQ ID NO: 9146 - DNA, 121 bp, synthetic construct
  misc_feature 1..121: note = Description of artificial sequence: synthetic polynucleotide sequence
  source 1..121: mol_type = other DNA
gactcaaactggtgggtgcttaagtctgattttcgtttaccaacggaagaagagatcagagctatggtgtcaccagagcagtgctgtgcttattatagcatgatagctgcagagcaacgac

SEQ ID NO: 9147 - DNA, 121 bp, synthetic construct
  misc_feature 1..121: note = Description of artificial sequence: synthetic polynucleotide sequence
  source 1..121: mol_type = other DNA
atggatctgtcctcttccaggatgctggctatggtgagaaatccttttttgctccagaagaagaaaatgaggaagatttccagatgaagattgatgatgaagtaaggctttatactagttt

SEQ ID NO: 9148 - DNA, 151 bp, synthetic construct
  misc_feature 1..151: note = Description of artificial sequence: synthetic polynucleotide sequence
  source 1..151: mol_type = other DNA
ggttcgcactgccccttggaacaccacaagggccttcattgctgccatgaagggcaagtgtctgctagaggtgactggggtggcagatcccacggggtgtggtgaaggattctcctatgtgaagattccaaacaaaccaacacagcagaag

SEQ ID NO: 9149 - DNA, 121 bp, synthetic construct
  misc_feature 1..121: note = Description of artificial sequence: synthetic polynucleotide sequence
  source 1..121: mol_type = other DNA
ggatgataaagaaccgcagccagtgaagaagacagtgacaggaacagatgcagaccttcgtcgcctttccctgaaaaatgccaagcaacttctacgtaaatttggtgtgcctgaggaagag

SEQ ID NO: 9150 - DNA, 177 bp, synthetic construct
  misc_feature 1..177: note = Description of artificial sequence: synthetic polynucleotide sequence
  source 1..177: mol_type = other DNA
gattaaaaagttgtcccgctgggaagtgattgatgtggtgcgcacaatgtcaacagaacaggctcgttctggagaggggcccatgagtaaatttgcccgtggatcaaggttttctgtggctgagcatcaagagcgttacaaagaggaatgtcagcgcatctttgacctacagaacaa

SEQ ID NO: 9151 - DNA, 180 bp, synthetic construct
  misc_feature 1..180: note = Description of artificial sequence: synthetic polynucleotide sequence
  source 1..180: mol_type = other DNA
gggttctgtcatcaactgaagtcttatcaactgacacagacagcagctcagctgaagatagtgactttgaagaaatgggaaagaacattgagaacatgttgcagaacaagaaaaccagctctcagctttcacgtgaacgggaggaacaggagcggaaggaactacagcgaatgctactgg

SEQ ID NO: 9152 - DNA, 215 bp, synthetic construct
  misc_feature 1..215: note = Description of artificial sequence: synthetic polynucleotide sequence
  source 1..215: mol_type = other DNA
gcagcaggctcagcagcatccggaaacaatcacagagatgatgacacagcttccgtgactagccttaactcttctgccactggacgctgtctcaagatttatcgcacgtttcgagatgaagaggggaaagagtatgttcgctgtgagacagtccgaaaaccagctgtcattgatgcctatgtgcgcatacggactacaaaagatgaggaattcat

SEQ ID NO: 9153 - DNA, 167 bp, synthetic construct
  misc_feature 1..167: note = Description of artificial sequence: synthetic polynucleotide sequence
  source 1..167: mol_type = other DNA
gtcgaaaatttgccctttttgatgaacaacatcgggaagagatgcgaaaagaacggcggaggattcaagagcaactgaggcggcttaagaggaaccaggaaaaggagaagcttaagggtcctcctgagaagaagcccaagaaaatgaaggagcgtcctgacctaaaa

SEQ ID NO: 9154 - DNA, 213 bp, synthetic construct
  misc_feature 1..213: note = Description of artificial sequence: synthetic polynucleotide sequence
  source 1..213: mol_type = other DNA
gctgaaatgtggggcatgtggtgccattggacacatgaggactaacaaattctgccccctctattatcaaacaaatgcgccaccttccaaccctgttgccatgacagaagaacaggaggaggagttggaaaagacagtcattcataatgataatgaagaacttatcaaggttgaagggaccaaaattgtcttggggaaacagctaattgagag

SEQ ID NO: 9155 - DNA, 121 bp, synthetic construct
  misc_feature 1..121: note = Description of artificial sequence: synthetic polynucleotide sequence
  source 1..121: mol_type = other DNA
ttttagtgcggatgaggttcgcagaaaatctctggttctcaagtttcctaaacagcagcttcctccaaagaagaaacggcgagttggaaccactgttcactgtgactatttgaatgtgagt

SEQ ID NO: 9156 - DNA, 121 bp, synthetic construct
  misc_feature 1..121: note = Description of artificial sequence: synthetic polynucleotide sequence
  source 1..121: mol_type = other DNA
tttctccttagagacctcataagtccatccaccggcgccgcacagaccctatggtgacgctgtcgtccatcttggagtctatcatcaatgacatgagagatcttccaaatgtgagttcatt

SEQ ID NO: 9157 - DNA, 179 bp, synthetic construct
  misc_feature 1..179: note = Description of artificial sequence: synthetic polynucleotide sequence
  source 1..179: mol_type = other DNA
gacataccctttccacactccagtcaatgcaaaggttgtaaaggactactacaaaatcatcactcggccaatggacctacaaacactccgcgaaaacgtgcgtaaacgcctctacccatctcgggaagagttcagagagcatctggagctaattgtgaaaaatagtgcaacctacaatg

SEQ ID NO: 9158 - DNA, 121 bp, synthetic construct
  misc_feature 1..121: note = Description of artificial sequence: synthetic polynucleotide sequence
  source 1..121: mol_type = other DNA
gtttcatctctttctgttcctctacagggccaaaacactcattgactcagatctctcaatccatgctggatctctgtgatgaaaaactcaaagaggtaagacagttagaatgagagaaagg

SEQ ID NO: 9159 - DNA, 121 bp, synthetic construct
  misc_feature 1..121: note = Description of artificial sequence: synthetic polynucleotide sequence
  source 1..121: mol_type = other DNA
aagaagacaaattagctcgcttagagaaagctatcaaccccttgctggatgatgatgaccaagtggcgttttctttcattctggacaacattgtcacccagaaaatgatggcagttccaga

SEQ ID NO: 9160 - DNA, 121 bp, synthetic construct
  misc_feature 1..121: note = Description of artificial sequence: synthetic polynucleotide sequence
  source 1..121: mol_type = other DNA
tttctatttactagtcttggccatttcatcacccagttaataagaaatttgttccagattattacaaagtgattgtcaatccaatggatttagagaccatacgtaaggtgagtgagtgatt

SEQ ID NO: 9161 - DNA, 121 bp, synthetic construct
  misc_feature 1..121: note = Description of artificial sequence: synthetic polynucleotide sequence
  source 1..121: mol_type = other DNA
tgattcttttcatcacagaacatctccaagcacaagtatcagagtcgggagagctttctggatgatgtaaaccttattctggccaacagtgttaagtataatggtgggtatttctcattat

SEQ ID NO: 9162 - DNA, 121 bp, synthetic construct
  misc_feature 1..121: note = Description of artificial sequence: synthetic polynucleotide sequence
  source 1..121: mol_type = other DNA
aatggcactttcttattttatttataggacctgagagtcagtatactaagactgcccaggagattgtgaacgtctgttaccagacattgactgaggtaggtggtaaagatggaggtcctaa

SEQ ID NO: 9163 - DNA, 121 bp, synthetic construct
  misc_feature 1..121: note = Description of artificial sequence: synthetic polynucleotide sequence
  source 1..121: mol_type = other DNA
tatgatgaacatttgactcaacttgagaaggatatttgtactgctaaagaagcagctttggaggaagcagaattagaaagcctggacccaatgaccccagggccctacacgcctcaggtga

SEQ ID NO: 9164 - DNA, 121 bp, synthetic construct
  misc_feature 1..121: note = Description of artificial sequence: synthetic polynucleotide sequence
  source 1..121: mol_type = other DNA
ctcctgatttgtatgataccaacacatccctcagtatgtctcgagatgcctctgtatttcaagatgagagcaatatgtctgtcttggatattcccagtgccactccagaaaagcaggtaac

SEQ ID NO: 9165 - DNA, 158 bp, synthetic construct
  misc_feature 1..158: note = Description of artificial sequence: synthetic polynucleotide sequence
  source 1..158: mol_type = other DNA
ggaaggtgaagatggagatggtgatcttgcagatgaagaggaaggaactgtacaacagcctcaagccagtgtcctgtatgaggatttgcttatgtctgaaggagaagatgatgaggaagatgctgggagtgatgaagaaggagacaatcctttctctg

SEQ ID NO: 9166 - DNA, 179 bp, synthetic construct
  misc_feature 1..179: note = Description of artificial sequence: synthetic polynucleotide sequence
  source 1..179: mol_type = other DNA
gctatccagctgagtgaaagtggaagtgactctgatgtgggatctggtggaataagacccaaacaaccccgcatgcttcaggagaacacaaggatggacatggaaaatgaagaaagcatgatgtcctatgagggagacggtggggaggcttcccatggtttggaggatagcaacatcag

SEQ ID NO: 9167 - DNA, 224 bp, synthetic construct
  misc_feature 1..224: note = Description of artificial sequence: synthetic polynucleotide sequence
  source 1..224: mol_type = other DNA
gttatgggagctatgaggagcctgatcccaagtcgaacacccaagacacaagcttcagcagcatcggtgggtatgaggtatcagaggaggaagaagatgaggaggaggaagagcagcgctctgggccgagcgtactaagccaggtccacctgtcagaggacgaggaggacagtgaggatttccactccattgctggggacagtgacttggactctgatgaatga

SEQ ID NO: 9168 - DNA, 121 bp, synthetic construct
  misc_feature 1..121: note = Description of artificial sequence: synthetic polynucleotide sequence
  source 1..121: mol_type = other DNA
ttttcgtttttcaatttccagtactccagtgtctatatatctctgggacctttttaactcatcagaaagctgaaacaaaaatatattccaatctattagtctctgaaagaaaagtaggatt

SEQ ID NO: 9169 - DNA, 121 bp, synthetic construct
  misc_feature 1..121: note = Description of artificial sequence: synthetic polynucleotide sequence
  source 1..121: mol_type = other DNA
aaataagaatcatacctgtatgggtagccatgatatttagatctaaaaatagagagcatccaactgaagaataatacaacaagtccaataccagccacacacattactgcagaaaaataaa

SEQ ID NO: 9170 - DNA, 121 bp, synthetic construct
  misc_feature 1..121: note = Description of artificial sequence: synthetic polynucleotide sequence
  source 1..121: mol_type = other DNA
acattttgagtaaggtgacttactctttcgctttccaatatccatgtcagaggtagcagcttcacataaaagcaccattcctaaggtaactccaccatctaagaaaaattgtttaaggaga

SEQ ID NO: 9171 - DNA, 121 bp, synthetic construct
  misc_feature 1..121: note = Description of artificial sequence: synthetic polynucleotide sequence
  source 1..121: mol_type = other DNA
agcaagaaagacttattgtaaaaggatactaaacagaagaacaatgtgtgtttcagctacaaactgggcttgactgcttccatggatataattctaggagggaaaaaagacaaaatggaat

SEQ ID NO: 9172 - DNA, 121 bp, synthetic construct
  misc_feature 1..121: note = Description of artificial sequence: synthetic polynucleotide sequence
  source 1..121: mol_type = other DNA
cccagacttcccttaccacatgtcccgtgtggggattcttatgggcatatggtggtcctcttatatggttccacatttgaccagatgtcatagcaagcacaaaacactaggaaacaaaaaa

SEQ ID NO: 9173 - DNA, 142 bp, synthetic construct
  misc_feature 1..142: note = Description of artificial sequence: synthetic polynucleotide sequence
  source 1..142: mol_type = other DNA
ccaaagctgcaaaagcccatccagttttattaaagagaaattccatattacttcttcgaagatacacaagtccaccaataacagccaaaagcaatcccaacataaggggaccagcataatttgggggtctaatcactctaat

SEQ ID NO: 9174 - DNA, 142 bp, synthetic construct
  misc_feature 1..142: note = Description of artificial sequence: synthetic polynucleotide sequence
  source 1..142: mol_type = other DNA
cattgacatcagttctgtcggcgatccaccgggcaatctgctcagctgaaaaaccccgcacctgtaactcatatgtatcaccccgtttgggtttcccttttgcaggaaagttgatgaaagttggagctgaattcatgtttag

SEQ ID NO: 9175 - DNA, 121 bp, synthetic construct
  misc_feature 1..121: note = Description of artificial sequence: synthetic polynucleotide sequence
  source 1..121: mol_type = other DNA
accatctgaaatacatcagagccttcatcaaaatccaccatggcaaaaaatatcctgttggtgaatgcactggagtatcgccaggagtttgccaggatctggaattcttcatcagcttgcc

SEQ ID NO: 9176 - DNA, 171 bp, synthetic construct
  misc_feature 1..171: note = Description of artificial sequence: synthetic polynucleotide sequence
  source 1..171: mol_type = other DNA
cttgcaaacgacacactgtctatgcagttggagagcagtgaacatgacgataacggagtaatttctcggtggggctttcacaaggcgacggaacttgtctccattcattcttattacaggtcttttgttagtccattccatcagctgactaaccttttcagataacaccat

SEQ ID NO: 9177 - DNA, 199 bp, synthetic construct
  misc_feature 1..199: note = Description of artificial sequence: synthetic polynucleotide sequence
  source 1..199: mol_type = other DNA
cctccttctttctttgggcagaggctgagggaacgtcgcaaacgatgagcagcgccaccaccatggtcacagagacacaccaaaaccgccaacgcgctgccatgttcgctcctctcccttctataagtgaaactttgctccggctaggtctgagggtggggcgtgagaacaggcaaatcggccccttgcctttcctcat

SEQ ID NO: 9178 - DNA, 121 bp, synthetic construct
  misc_feature 1..121: note = Description of artificial sequence: synthetic polynucleotide sequence
  source 1..121: mol_type = other DNA
tgctacccaaggtgctcattaaatatgcgctgactgagcttgttgaattactccatacataggctgttgaaaaggctccagtgtatgatatgaggaattcaagctgactataacctctccc

SEQ ID NO: 9179 - DNA, 121 bp, synthetic construct
  misc_feature 1..121: note = Description of artificial sequence: synthetic polynucleotide sequence
  source 1..121: mol_type = other DNA
caggaaaacactggaaacaacctttaggacattgggctgggcaaaaatttcttgcataataccacacgagcacagacaatcaaagcaaaaaaatgaacaactgggatcatgtcaagctaaa

SEQ ID NO: 9180 - DNA, 121 bp, synthetic construct
  misc_feature 1..121: note = Description of artificial sequence: synthetic polynucleotide sequence
  source 1..121: mol_type = other DNA
acaagcatctacatgtgcatatgtatatttgtataaggaaaagaaacggtacgcaagaaaagagacccaatttttcacaatagatatattcaggccatggaacggtagtataaaaggaaac

SEQ ID NO: 9181 - DNA, 121 bp, synthetic construct
  misc_feature 1..121: note = Description of artificial sequence: synthetic polynucleotide sequence
  source 1..121: mol_type = other DNA
cagataagtaacatccttaatccctcctacaggtactcaaccgtcttgacaactctcattccaaacaggtttgcacccccaatggatacctatggcaatgttgtcacctattcaatcagcc

SEQ ID NO: 9182 - DNA, 121 bp, synthetic construct
  misc_feature 1..121: note = Description of artificial sequence: synthetic polynucleotide sequence
  source 1..121: mol_type = other DNA
accaaatacgtcttcagattttgtcaaatgtctctccagggcgcaaaataacccatagttgtcaatcactagaataaagaaatctctgtgtaattaagaatttaaagcagtcatttttttc

SEQ ID NO: 9183 - DNA, 121 bp, synthetic construct
  misc_feature 1..121: note = Description of artificial sequence: synthetic polynucleotide sequence
  source 1..121: mol_type = other DNA
cttcagtcagataaggaaacttcggagaacaactttatcttgtgtttttgtggagacagataattgagaaacaggatggggggaatgtcagagaggccttgagggttcttcagttcagcat

SEQ ID NO: 9184 - DNA, 121 bp, synthetic construct
  misc_feature 1..121: note = Description of artificial sequence: synthetic polynucleotide sequence
  source 1..121: mol_type = other DNA
ttggtttacttgggaaatgctattcaccaatataaagcctagaaaagtgaaatttcagtatgcaccttataaactccatcggcatgtagataaccaactaattttgagttacagttggtcc

SEQ ID NO: 9185 - DNA, 121 bp, synthetic construct
  misc_feature 1..121: note = Description of artificial sequence: synthetic polynucleotide sequence
  source 1..121: mol_type = other DNA
aatacaagacttgatagaggtgaattcttcagcacaggtgtattcatccagaattcaaaacttaaaattcaagcactagggtatgttgtaatggtatgttaaattggctaattaaaacctg

SEQ ID NO: 9186 - DNA, 121 bp, synthetic construct
  misc_feature 1..121: note = Description of artificial sequence: synthetic polynucleotide sequence
  source 1..121: mol_type = other DNA
agaaccaagaagcttattggcgagctcaggattcttcatccatgacatctagaatattgctcagaagaattttgaaagtgggacgctcatctgctttctaaaaccaaagaaaaagtaaagt

SEQ ID NO: 9187 - DNA, 159 bp, synthetic construct
  misc_feature 1..159: note = Description of artificial sequence: synthetic polynucleotide sequence
  source 1..159: mol_type = other DNA
cctcatgccagcaactgtacatgatggtatataccttctctgaagccagatgaggcctgtagagacgtaggccttgggcaatgtgttcagcagtctcactgttagtaaatctctcatatggcatcttccccagggagtaaatttcccacatcaaaaccc

SEQ ID NO: 9188 - DNA, 121 bp, synthetic construct
  misc_feature 1..121: note = Description of artificial sequence: synthetic polynucleotide sequence
  source 1..121: mol_type = other DNA
ccaaaagcccaaatgtcagatttgctgctgaacttgctatacatcaggacttccggtggggaccaccggactggaaatttggagcctactgagcttgtgtattcatcatccaggacatacc

SEQ ID NO: 9189 - DNA, 121 bp, synthetic construct
  misc_feature 1..121: note = Description of artificial sequence: synthetic polynucleotide sequence
  source 1..121: mol_type = other DNA
gagggaaagatgaaaaagccacactcacctggacaggccgaaatcagatactttaacaactccttgatcgtttaccaaacagtttcgagctgcctgtagtgcaaacagagaccagtgagac

SEQ ID NO: 9190 - DNA, 218 bp, synthetic construct
  misc_feature 1..218: note = Description of artificial sequence: synthetic polynucleotide sequence
  source 1..218: mol_type = other DNA
ccaggtctcggtgaaggaactgctttgactccaggtattccatggcttcacagacatccttgcacatctctagcagctgctgagtctggaagcggtggcgcatctccctcaggtagttcaggaggcagccattggccatgtactcagtgatgatgaagatggggcgctgcttggtgcagacgccatacaactgcaccagcttctcatgggaaagattc

SEQ ID NO: 9191 - DNA, 173 bp, synthetic construct
  misc_feature 1..173: note = Description of artificial sequence: synthetic polynucleotide sequence
  source 1..173: mol_type = other DNA
catcatgactttggcttcttcaatgaattcatcttcagacatggagccttctttgatcatcttgatggccacgtcgtactggcctctccatttcccatacttcactaccccaaattgtccagtccccagctccttcaagaaggtcaggtcctttggatcaatttcccatgatc

SEQ ID NO: 9192 - DNA, 121 bp, synthetic construct
  misc_feature 1..121: note = Description of artificial sequence: synthetic polynucleotide sequence
  source 1..121: mol_type = other DNA
accccagagaaataaggagttaccgtatcccaggcctgcagtggaaggtgcattcttgttttgttgagacactggatatttgagcctggatatgagtcctgaaacagagagagaggtcatg

SEQ ID NO: 9193 - DNA, 121 bp, synthetic construct
  misc_feature 1..121: note = Description of artificial sequence: synthetic polynucleotide sequence
  source 1..121: mol_type = other DNA
cagagttgtgctgatggtagttaatgagctcagggatggtgctgaaaaggtgcttctcagccaggtaatactggctctgaggtgtggaacacacaacataatgacgtatcaccccttgagg

SEQ ID NO: 9194 - DNA, 121 bp, synthetic construct
  misc_feature 1..121: note = Description of artificial sequence: synthetic polynucleotide sequence
  source 1..121: mol_type = other DNA
ccttggaatagtagcactcaccctgtggatttagcaaacacagacactgtatatttgccagctttgctggagtctctgacaatgaaacctccttctttcccctgaaacaacgaaaaagaag

SEQ ID NO: 9195 - DNA, 121 bp, synthetic construct
  misc_feature 1..121: note = Description of artificial sequence: synthetic polynucleotide sequence
  source 1..121: mol_type = other DNA
gagaatgctgtgtgctagtggttccacacttacctcttgctttagcagttgctcagcctgactccgagtcatgtgtttggaataccacctgtgaagggagagtgctgcttgagtggctcct

SEQ ID NO: 9196 - DNA, 121 bp, synthetic construct
  misc_feature 1..121: note = Description of artificial sequence: synthetic polynucleotide sequence
  source 1..121: mol_type = other DNA
agattgtggactgacataaacatacttactcatacatttctatggagtcttctgcttcagtgacatagttactaggaatgtagccttcctgcctgtgaaggaaacaatgtggcagttcatc

SEQ ID NO: 9197 - DNA, 189 bp, synthetic construct
  misc_feature 1..189: note = Description of artificial sequence: synthetic polynucleotide sequence
  source 1..189: mol_type = other DNA
cccatttttatctcgtgctctccaccatggtaagttgctttcctccaagataaaatattcatcacccttccgcagctgtagatcatttgcattcattggcatgtaatcataaagggccacaacctttttcagctcacttgtggagactggtgctgctgctggctcaggcggtagtggctttttcaagat

SEQ ID NO: 9198 - DNA, 121 bp, synthetic construct
  misc_feature 1..121: note = Description of artificial sequence: synthetic polynucleotide sequence
  source 1..121: mol_type = other DNA
gtggcagcacccagtttccctgtatacctggtcctcctcaggcgttgggggaagaggcttttttgtcttccggtgagaactcccaggttttaagcctgcaaaacaagaagccagtgatgat

SEQ ID NO: 9199 - DNA, 121 bp, synthetic construct
  misc_feature 1..121: note = Description of artificial sequence: synthetic polynucleotide sequence
  source 1..121: mol_type = other DNA
attcctgttctccaaaatttggcagcccatagcatttttggctgtctgagagcagcagagatactgcccatcgatccagaagcaagggtgatatttctgaaccagatcactgttgtaccgg

SEQ ID NO: 9200 - DNA, 121 bp, synthetic construct
  misc_feature 1..121: note = Description of artificial sequence: synthetic polynucleotide sequence
  source 1..121: mol_type = other DNA
attttccaaataattctcaccgtttttgagctggtgaatccaccgcttccttagttcttcagttggggagaagacgtagagaggcccttcatcatatacaacctgggtcgatgaaaacaca

SEQ ID NO: 9201 - DNA, 121 bp, synthetic construct
  misc_feature 1..121: note = Description of artificial sequence: synthetic polynucleotide sequence
  source 1..121: mol_type = other DNA
agatttggtgagagaaaataactcacctggaagggataagggaacctttcaatgattgaaatttgctccatttcactggactcttcacctcttctctgtaatgaaataagaaaaaatggtt

SEQ ID NO: 9202 - DNA, 121 bp, synthetic construct
  misc_feature 1..121: note = Description of artificial sequence: synthetic polynucleotide sequence
  source 1..121: mol_type = other DNA
tctcttcttaccggaatctgtctttctggaggaggatttttttcaggaaccactgtttcaacacaagtgatcttctcaacatctattgaacccttcttactgcctcttctctgagaagtag

SEQ ID NO: 9203 - DNA, 172 bp, synthetic construct
  misc_feature 1..172: note = Description of artificial sequence: synthetic polynucleotide sequence
  source 1..172: mol_type = other DNA
ccccacgttcaaagtcatactcatagtaggagagtttgtgcacggtcaagagaaacaggcgcttcttgaagtttagaggtgatgttttctttttctgttgggatcgcttcagaaagatgctctccagaatcactgcggccatagcttcttctttctggagttcacctgtgtg

SEQ ID NO: 9204 - DNA, 121 bp, synthetic construct
  misc_feature 1..121: note = Description of artificial sequence: synthetic polynucleotide sequence
  source 1..121: mol_type = other DNA
ttataagcctattagattactgtacctctcccccggaacagtgcctgccacataatgggcatccaataaccatttgttgaatggaccaactggccatgtgatagatgaactggaacaattg

SEQ ID NO: 9205 - DNA, 121 bp, synthetic construct
  misc_feature 1..121: note = Description of artificial sequence: synthetic polynucleotide sequence
  source 1..121: mol_type = other DNA
aacatgccaagcctgtgggcctctgcccaggatgtgtggaacacttggggccaaaagcttctcctgatctaccgtggaggctccctggtcatcctaaggtccagtgtgacatggggcctca

SEQ ID NO: 9206 - DNA, 121 bp, synthetic construct
  misc_feature 1..121: note = Description of artificial sequence: synthetic polynucleotide sequence
  source 1..121: mol_type = other DNA
ttcaaacttctgttcagcagggacgtgagtggacaatggtgactgatagttggaaatatcagcaaacatcttaaattttatactcaaatgaatgagcaatgaaccaggagaataggtccag

SEQ ID NO: 9207 - DNA, 121 bp, synthetic construct
  misc_feature 1..121: note = Description of artificial sequence: synthetic polynucleotide sequence
  source 1..121: mol_type = other DNA
tggctccttgtaatttttacctttttacttaaaattacagcatctttttcaatgagtgcctatgtgactgtgacttattacaatgaaaccagcaactacactgcaatagagacatgtgaat

SEQ ID NO: 9208 - DNA, 121 bp, synthetic construct
  misc_feature 1..121: note = Description of artificial sequence: synthetic polynucleotide sequence
  source 1..121: mol_type = other DNA
aagcctagtgaaatgttcctgcctgtaacagaggcttatctctagtgaccagatcacaactccatggtgtctcaagactcttttctctaaatcccatttcaaaagcaaccccacctcctcc

SEQ ID NO: 9209 - DNA, 121 bp, synthetic construct
  misc_feature 1..121: note = Description of artificial sequence: synthetic polynucleotide sequence
  source 1..121: mol_type = other DNA
gtttagttcccaaggcctttattatacttcttcaggtgtgttccatgcatgtgccatttaagggcaaactgcacatgtcaggggactttggcgaatctgagattgcagacttacgtgaata

SEQ ID NO: 9210 - DNA, 121 bp, synthetic construct
  misc_feature 1..121: note = Description of artificial sequence: synthetic polynucleotide sequence
  source 1..121: mol_type = other DNA
agtatgttgactctgcacagagatgcaaagtccagtggaggtgttttgtgaaagccacaaattataagagagtctatcacatgtaagcatcttggtgtcaaagagaaagtcaaaggcagac

SEQ ID NO: 9211 - DNA, 121 bp, synthetic construct
  misc_feature 1..121: note = Description of artificial sequence: synthetic polynucleotide sequence
  source 1..121: mol_type = other DNA
gctcagtaataaacttgtcctgttacttagcgagtcatttcatctttcttgtccttaatttccttgtccacaagatgacacgatctccaaggtctgacattcttataccatggctctgttt

SEQ ID NO: 9212 - DNA, 121 bp, synthetic construct
  misc_feature 1..121: note = Description of artificial sequence: synthetic polynucleotide sequence
  source 1..121: mol_type = other DNA
ttttgttattttgactagaatagtcctaaatctccacattattccagattcatttccttgttctattaatctggttctattgccccaattcctgtctccacttaacattgcacaatgatct

SEQ ID NO: 9213 - DNA, 121 bp, synthetic construct
  misc_feature 1..121: note = Description of artificial sequence: synthetic polynucleotide sequence
  source 1..121: mol_type = other DNA
atagctagtctttgaacagagtaggtgctccagaatattctaagtgaaggagagaaagatttcaaatgtttgtaagcatggaagagtaaggcaatgatggagctactagcaaaggcaaaga

SEQ ID NO: 9214 - DNA, 121 bp, synthetic construct
  misc_feature 1..121: note = Description of artificial sequence: synthetic polynucleotide sequence
  source 1..121: mol_type = other DNA
gaccccagtgtatgccccacccctgaccccgctcgcgacatgtccaccccggctcggcggcgcctcatgcgggacttcaagaggtaaaccgaggggacggccgaggccgggggttgcgagc

SEQ ID NO: 9215 - DNA, 121 bp, synthetic construct
  misc_feature 1..121: note = Description of artificial sequence: synthetic polynucleotide sequence
  source 1..121: mol_type = other DNA
ccctgtctgtcttcccgaaggttgcaggaggatcctccagccggagtcagcggggctccgtccgagaacaacataatggtgtggaacgcggtcattttcgggtgagtctgcgttcgtggcg

SEQ ID NO: 9216 - DNA, 121 bp, synthetic construct
  misc_feature 1..121: note = Description of artificial sequence: synthetic polynucleotide sequence
  source 1..121: mol_type = other DNA
gaagggggccccttaagtgggaactgaccatttttctctgtgttgcaggcctgaagggaccccgtttgaggatggtaagagagagtttctttacccacttttcaggagcctggtcatctgg

SEQ ID NO: 9217 - DNA, 121 bp, synthetic construct
  misc_feature 1..121: note = Description of artificial sequence: synthetic polynucleotide sequence
  source 1..121: mol_type = other DNA
tcttttctaaccacaggaacatttaaacttacaatagaattcactgaagaatatccaaataaaccacctacagttagatttgtctctaagatgttccatccaaatggcaagtatcactttt

SEQ ID NO: 9218 - DNA, 121 bp, synthetic construct
  misc_feature 1..121: note = Description of artificial sequence: synthetic polynucleotide sequence
  source 1..121: mol_type = other DNA
acttctttgttcttagtctatgcagatggtagtatatgtctggacatacttcagaaccgttggagtccaacctatgatgtgtcttccattctaacatccatacaggtgaatttttccttaa

SEQ ID NO: 9219 - DNA, 121 bp, synthetic construct
  misc_feature 1..121: note = Description of artificial sequence: synthetic polynucleotide sequence
  source 1..121: mol_type = other DNA
tgttggatgaacccaatcccaatagtccagcaaacagccaggctgctcagctgtaccaggagaacaaacgggaatatgaaaagcgtgtttctgcaatagtagaacaaagctggcgtgattg

SEQ ID NO: 9220 - DNA, 121 bp, synthetic construct
  misc_feature 1..121: note = Description of artificial sequence: synthetic polynucleotide sequence
  source 1..121: mol_type = other DNA
atggagcatctcgggattttaagcgaggagagcaacatgcttagattcattcattctctgattcaacacatatgtgtcacatactgtgctgggtggtgacaatgacggtagtgaaaaacac

SEQ ID NO: 9221 - DNA, 121 bp, synthetic construct
  misc_feature 1..121: note = Description of artificial sequence: synthetic polynucleotide sequence
  source 1..121: mol_type = other DNA
ctgcctggcacaggtagatggcattatatcagggctgtgtgaggttccatgggacaaacatgatgcatcttctctgggaggcagcttcactatgcagcaaatgcaactttaattcaaaatg

SEQ ID NO: 9222 - DNA, 121 bp, synthetic construct
  misc_feature 1..121: note = Description of artificial sequence: synthetic polynucleotide sequence
  source 1..121: mol_type = other DNA
agacataggaatcacctccagcctacctcagcatgatgttgtttgcatctcaccttattctgtaagcaactataagacctgctatattgttattgtttatttttcacctgcgtgttggtag

SEQ ID NO: 9223 - DNA, 121 bp, synthetic construct
  misc_feature 1..121: note = Description of artificial sequence: synthetic polynucleotide sequence
  source 1..121: mol_type = other DNA
ctccaacacagaaactattgtgtgttctcttgccctcgccccactgctaaaccagagctccctataagaatccctctcttgatttaaaacaccattgatggggagtcaaattaaatataaa

SEQ ID NO: 9224 - DNA, 121 bp, synthetic construct
  misc_feature 1..121: note = Description of artificial sequence: synthetic polynucleotide sequence
  source 1..121: mol_type = other DNA
ggcattctaccttacaagatcttgcttctgtcaattttcccagcctccgggcactgatacaatagcaaaactcacaataaacagacataacctggacctccaagatattcatacatgatgg

SEQ ID NO: 9225 - DNA, 121 bp, synthetic construct
  misc_feature 1..121: note = Description of artificial sequence: synthetic polynucleotide sequence
  source 1..121: mol_type = other DNA
tttcaggcccggttcccgcactttgaaatcaccaccatgcccaaggccgagttctacaggcaggtggcctccagtcagctgctgacccctgccgagaggcctggaggcttggacgacagat

SEQ ID NO: 9226 - DNA, 121 bp, synthetic construct
  misc_feature 1..121: note = Description of artificial sequence: synthetic polynucleotide sequence
  source 1..121: mol_type = other DNA
caggctcctctgagactgtggagctggtgcggtacgagccagacctacttcggctcctagggtccgaggtggaattccagtcttgcaacagttgaccgggaaaacagcccctcctcttctt

SEQ ID NO: 9227 - DNA, 121 bp, synthetic construct
  misc_feature 1..121: note = Description of artificial sequence: synthetic polynucleotide sequence
  source 1..121: mol_type = other DNA
gctggggcaattttagcacatagctctcaatgtttgtgagataggtaagtggacagacggatgaatgaatgacgattggcatttgtaggcaccatcattgaatttataagattgcagaaat

SEQ ID NO: 9228 - DNA, 121 bp, synthetic construct
  misc_feature 1..121: note = Description of artificial sequence: synthetic polynucleotide sequence
  source 1..121: mol_type = other DNA
tggctgatcgtcacctgctgattcctctaaccatgcttggggcaaaggtaatgcagctgtaaaactgactgtgaattctacaaggacttattgagcagacatgtctgagcaaaggaccaga

SEQ ID NO: 9229 - DNA, 121 bp, synthetic construct
  misc_feature 1..121: note = Description of artificial sequence: synthetic polynucleotide sequence
  source 1..121: mol_type = other DNA
tcccaagaggaacagggacctcctggggtcactcagcagaatagccagcagggatcctttttttcctgttcacaagtcaacgcttgtctcaccaagctatgccgcctctttgtagtttatg

SEQ ID NO: 9230 - DNA, 121 bp, synthetic construct
  misc_feature 1..121: note = Description of artificial sequence: synthetic polynucleotide sequence
  source 1..121: mol_type = other DNA
atcatagaatattaagagccaggaaaggacttcaaaattatccagtatggcttcccaccctagacaagaagccctgtgagaaagccagtttagcaagtagcacaatctccattttatagaa

SEQ ID NO: 9231 - DNA, 121 bp, synthetic construct
  misc_feature 1..121: note = Description of artificial sequence: synthetic polynucleotide sequence
  source 1..121: mol_type = other DNA
gtaagaagggacagtgagaggaaagagtcatgtctagaggaccagaatctctgtcttgatgcttggtcagtaggacattgccatgccccattcccagctcccttacctgtttatccactcc

SEQ ID NO: 9232 - DNA, 121 bp, synthetic construct
  misc_feature 1..121: note = Description of artificial sequence: synthetic polynucleotide sequence
  source 1..121: mol_type = other DNA
tggcatgtggtagatgcttagtaaatggccagtgaactttaggatttggttgctttccaattggatccaatcttctgatataggggccagtgaaaattttctcttgtgcttgtaatcagac

SEQ ID NO: 9233 - DNA, 121 bp, synthetic construct
  misc_feature 1..121: note = Description of artificial sequence: synthetic polynucleotide sequence
  source 1..121: mol_type = other DNA
aaagaactttctaggcagaggaaatagcaagttcaaaagccctgaggcaagaaagaaacagtgcctttttgtcaatggatgtaattgttaggaaatctgtgcttgatgtgtggatttgggg

SEQ ID NO: 9234 - DNA, 121 bp, synthetic construct
  misc_feature 1..121: note = Description of artificial sequence: synthetic polynucleotide sequence
  source 1..121: mol_type = other DNA
ggtatctctgtaatagtctctacttcacacatggggaaactgaggtgcacagcatttacatatcttgcccaaggtcatccagctaattagttgtgaagccaagattcaaaagtaggtctct

SEQ ID NO: 9235 - DNA, 121 bp, synthetic construct
  misc_feature 1..121: note = Description of artificial sequence: synthetic polynucleotide sequence
  source 1..121: mol_type = other DNA
gacagtaaaacattttagggaatacaaaagggtaggagaaatatttcttaactgtcattcgtttccaagagcacagggctcaggtaaagttcagcactgttaagggaaaagacttgtaaat

SEQ ID NO: 9236 - DNA, 121 bp, synthetic construct
  misc_feature 1..121: note = Description of artificial sequence: synthetic polynucleotide sequence
  source 1..121: mol_type = other DNA
cacagactacgtgggctcaaatcttgattcgtcacttagtagctatataacctttagccgaacacataaccttaccaagcttagtttttaacttctgttaaaagaaaagaaaagcaaaatg

SEQ ID NO: 9237 - DNA, 121 bp, synthetic construct
  misc_feature 1..121: note = Description of artificial sequence: synthetic polynucleotide sequence
  source 1..121: mol_type = other DNA
tatttaaacaagtcctagccagagggggatcagtgatcccactggtcaaaacttgagttacctgaagcctcgccaccagaggctaaagtgccctggggttctaagtagatgtggggggaag

SEQ ID NO: 9238 - DNA, 121 bp, synthetic construct
  misc_feature 1..121: note = Description of artificial sequence: synthetic polynucleotide sequence
  source 1..121: mol_type = other DNA
ctgactctacctccctccacagtccctgagaaccctttgaaactattggacttaatttcctggccttcattcaggtctgtaatattcatttctgattcatgccatcatataaaatcttgca

SEQ ID NO: 9239 - DNA, 121 bp, synthetic construct
  misc_feature 1..121: note = Description of artificial sequence: synthetic polynucleotide sequence
  source 1..121: mol_type = other DNA
ccttcctcctcagcctcccaaagtgctgggattccaggcatgggcccctgcacctggctttaaaatactttcttgtttgattacatttcatttcattttcataagggcacaaagagaaagg

SEQ ID NO: 9240 - DNA, 121 bp, synthetic construct
  misc_feature 1..121: note = Description of artificial sequence: synthetic polynucleotide sequence
  source 1..121: mol_type = other DNA
gtgtgtgtcaaacccagaaggtgagacaaggacaggcaggcaaaggaggagtgaagtcactggctaagaaaggccagtgtgagggagggaggatgggtcagacctgagcgggcccagctac

SEQ ID NO: 9241 - DNA, 121 bp, synthetic construct
  misc_feature 1..121: note = Description of artificial sequence: synthetic polynucleotide sequence
  source 1..121: mol_type = other DNA
caatgccagagtgagtgagtaaatgccaactggttagttttagagtttgggaagagttcgagaaagatcaagaacccaaagtaaaagatacaggactccaaggcagtcagttgaagtaatg

SEQ ID NO: 9242 - DNA, 121 bp, synthetic construct
  misc_feature 1..121: note = Description of artificial sequence: synthetic polynucleotide sequence
  source 1..121: mol_type = other DNA
attgagcagtaatttgcagccttctgtctgtgagggaccccttggaaatctaccagaacttgtgaattctcttctaaccatcagcacagactcagagatagtgggctcccatttcagcagg

SEQ ID NO: 9243 - DNA, 121 bp, synthetic construct
  misc_feature 1..121: note = Description of artificial sequence: synthetic polynucleotide sequence
  source 1..121: mol_type = other DNA
atattaaaagctaaaataacaataagaggataaaccaaagctatggaaactattacctctggggtagaaacagcacagacagggacagaacctggacttacctgaatgtgtctagtttgtt

SEQ ID NO: 9244 - DNA, 1081 bp, synthetic construct
  misc_feature 1..1081: note = Description of artificial sequence: synthetic polynucleotide sequence
  source 1..1081: mol_type = other DNA
ctcagaacacactctcctgcctctggaggccgggcctggtggctccctccatcccttcagggtgcgcaccggcctcggagcgcacggacgtggtcctggcggagaagaggctctcgcggcgcgtgtccagggtgtctctgggcacccggcggcagcccaaatattcccgcaggcgcagctggaattcccgggacgcaaagtaataaacaaacgggtccagacagttgttgaggcagctgagacacagcgtgagcttgtacacgtggtagtagctcttgccgtagaacaggcggctcacgatgtgcgccaggagcacgaagttgttgggggcgaagcaggtgacaaaggccagcaagaccaccgcggccaggcccaccgcgcgcctccgctgctcccggccgtgcgcctcctccgtgcgcaacagcttgaggatggtggccgtgtaacaagccacggtgatcacgaacgggatgaggaacagcaggatgaagatggtgaagaggaacacggcccacatggccacgctggggagcatcgtccacttgaggacgtcgaagcaggtgatgatgcccagggcgtgcaccgggtaggtgagatcggtgcgcgccagcggggacagggcggtcaggagcagcagccaggtccctgcacacgcggccaccgcgtaacgacggcggcgccagcgcttggagctgagcgggtacaggacccccaggaagcgctccacgctgatacaggtcatggtgaggatgctggaatacatgtttgcgtaaaaggccacggtcaccacgttgcaaagcagcaccccgaatacccagtggtggcggttgcaatggtagtagatttggaaaggcaacacgctggccagcatcaggtccgtgacgctcaggttgatcatgaagatgaccgacggggatctgggccccatgcgccggcacagcacccacagagagaagaggttgcccgggatgctgaccgccgccaccagcgagtacaccacgggcagggccaccgcgatcgccgggttccgcagcatctgcagcgtcgcgttgtccgggccggtgctgttcgggacctgcat

SEQ ID NO: 9245 - DNA, 120 bp, synthetic construct
  misc_feature 1..120: note = Description of artificial sequence: synthetic polynucleotide sequence
  source 1..120: mol_type = other DNA
agacctcatcctgctcattattgctctctatctacaacaaaactggtggactctattggttgatctcctttggctcctcctgtttctggcgattttaatctggatgtattaccatggaca

SEQ ID NO: 9246 - DNA, 120 bp, synthetic construct
  misc_feature 1..120: note = Description of artificial sequence: synthetic polynucleotide sequence
  source 1..120: mol_type = other DNA
tctacaacaaaactggtggactctattggttgatctcctttggctcctcctgtttatggccattttaatctggatgtattttcatggaccacgacacactgatgaacaccaccacgatga

SEQ ID NO: 9247 - DNA, 120 bp, synthetic construct
  misc_feature 1..120: note = Description of artificial sequence: synthetic polynucleotide sequence
  source 1..120: mol_type = other DNA
atcgctctctggaatttgcacggacaggcattgtaccttggaattgtgctgttcatctttggctgcttacttggtaagatctaacattccctaggacttatttaccacaccctcaccttt

SEQ ID NO: 9248 - DNA, 120 bp, synthetic construct
  misc_feature 1..120: note = Description of artificial sequence: synthetic polynucleotide sequence
  source 1..120: mol_type = other DNA
atcgctctctggaatttgcacggacaggcattgttccttggaattgtgctgttcatcttcgggtgcttacttggtaagatctaacattccctaggaattatttaccacacccccactttt

SEQ ID NO: 9249 - DNA, 120 bp, synthetic construct
  misc_feature 1..120: note = Description of artificial sequence: synthetic polynucleotide sequence
  source 1..120: mol_type = other DNA
tatctgcaacaaaactggtggactctattggttgatctcctttggctcctcctgtttctggcgattttgatctggatgtattaccatggacaacgacacagtgatgaacaccaccacgat

SEQ ID NO: 9250 - DNA, 120 bp, synthetic construct
  misc_feature 1..120: note = Description of artificial sequence: synthetic polynucleotide sequence
  source 1..120: mol_type = other DNA
ccaaccctaacactcttttttcaacgcagtcttaggtatctggatctacttattggagatgctctggcgacttggtgccaccatctggcagcttttggccttcttcctagccttcttcct

SEQ ID NO: 9251 - DNA, 120 bp, synthetic construct
  misc_feature 1..120: note = Description of artificial sequence: synthetic polynucleotide sequence
  source 1..120: mol_type = other DNA
attgcagaaggtttaagacttctcctggctaggtgtcacgtagaaaggactaccgaggatggaaattgggtcgccggtgtgttcgtatatggaggtagtaagacctccctttacaacctc

SEQ ID NO: 9252 - DNA, 120 bp, synthetic construct
  misc_feature 1..120: note = Description of artificial sequence: synthetic polynucleotide sequence
  source 1..120: mol_type = other DNA
ggagccctttgtatactcctactgatgagtaagtattacaccctttgccccacaccccctttcccttactcttccttctctaacgcactttctcctctttccccagtcaccctcctgctc

SEQ ID NO: 9253 - DNA, 120 bp, synthetic construct
  misc_feature 1..120: note = Description of artificial sequence: synthetic polynucleotide sequence
  source 1..120: mol_type = other DNA
agagttctcctggctaggagtcacgtagaaaggactaccgaggaaggaaattgggtcgccggtgtgttcgtatatggaggtagtaagacctccctttacaacctcaggcgaggaattgcc

SEQ ID NO: 9254 - DNA, 120 bp, synthetic construct
  misc_feature 1..120: note = Description of artificial sequence: synthetic polynucleotide sequence
  source 1..120: mol_type = other DNA
cttgctgttccacaatgtcgtattacaccattgagtcgtctcccctttggaatggcccctggacccggcccacaacctggcccactaagggagtccattgtctgttatttcatggtcttt

SEQ ID NO: 9255 - DNA, 120 bp, synthetic construct
  misc_feature 1..120: note = Description of artificial sequence: synthetic polynucleotide sequence
  source 1..120: mol_type = other DNA
ccaagcactggaccccggggtcagggtgatggaggcaggcgcaaaaaaggagggtggtttggaaagcatcgtggtcaaggaggttccaacccgaaatttgagaacattgcagaaggttta

SEQ ID NO: 9256 - DNA, 120 bp, synthetic construct
  misc_feature 1..120: note = Description of artificial sequence: synthetic polynucleotide sequence
  source 1..120: mol_type = other DNA
tcaaaacctaggcgcacctggaggtggtcctgacaatggcccacaggaccctgacaacactgatgacaatggcccacaggaccctgacaacactgatgacaatggcaacactgatgacaa

SEQ ID NO: 9257 - DNA, 120 bp, synthetic construct
  misc_feature 1..120: note = Description of artificial sequence: synthetic polynucleotide sequence
  source 1..120: mol_type = other DNA
ggaggccttggtctactcctactgatgagtaagtattacaccctttgccccccaccccctttcccttacgcttccttctctaacgcactttctcctctttccccagtcaccctcctactc

SEQ ID NO: 9258 - DNA, 120 bp, synthetic construct
  misc_feature 1..120: note = Description of artificial sequence: synthetic polynucleotide sequence
  source 1..120: mol_type = other DNA
tggcccacaggaccctgacaacactgatgacaatggcccacatgacccgctgcctcataaccctagcgactctgctggaaatgatggaggccctccaaatttgacggaagaggttgaaaa

SEQ ID NO: 9259 - DNA, 120 bp, synthetic construct
  misc_feature 1..120: note = Description of artificial sequence: synthetic polynucleotide sequence
  source 1..120: mol_type = other DNA
acactgatgacaatggcccacaggaccctgacaacactgatgacaatggcccacatgacccgctgcctcataaccctagcgactctgctggaaatgatggaggccctccaaatttgacgg

SEQ ID NO: 9260 - DNA, 120 bp, synthetic construct
  misc_feature 1..120: note = Description of artificial sequence: synthetic polynucleotide sequence
  source 1..120: mol_type = other DNA
gacaacactgatgacaatggcccacaggaccctgacaacactgctgacaatggcccacatgacccgctgcctcataaccctagcgactctgctggaaatgatggaggcccaccaaatttg

SEQ ID NO: 9261 - DNA, 120 bp, synthetic construct
  misc_feature 1..120: note = Description of artificial sequence: synthetic polynucleotide sequence
  source 1..120: mol_type = other DNA
cactgatgacaatggcccacaggaccctgacaacactgatgacaatggcccacaggaccctgacaacactgatgacaatggcccacaggaccctgacaacactgatgacaatggcccaca

SEQ ID NO: 9262 - DNA, 120 bp, synthetic construct
  misc_feature 1..120: note = Description of artificial sequence: synthetic polynucleotide sequence
  source 1..120: mol_type = other DNA
acgacacactgatgaacaccaccacgatgactccctcccgcaccctcaacaagctaccgacgattctagccatgaatctgactctaactccaacgagggcagacaccacctgctcgtgag

SEQ ID NO: 9263 - DNA, 120 bp, synthetic construct
  misc_feature 1..120: note = Description of artificial sequence: synthetic polynucleotide sequence
  source 1..120: mol_type = other DNA
acgacacagtgatgaacaccaccacgatgactccctcccgcaccctcaacaagctaccgatgattctggccatgaatctgactctaactccaacgagggcagacaccacctgctcgtgag

SEQ ID NO: 9264 - DNA, 120 bp, synthetic construct
  misc_feature 1..120: note = Description of artificial sequence: synthetic polynucleotide sequence
  source 1..120: mol_type = other DNA
tgacccgctgcctcataaccctagcgactctgctggaaatgatggaggccctccaaatttgacggaagaggttgaaaacaaaggaggtgaccgggacccgccttcgatgacagacggtgg

SEQ ID NO: 9265 - DNA, 120 bp, synthetic construct
  misc_feature 1..120: note = Description of artificial sequence: synthetic polynucleotide sequence
  source 1..120: mol_type = other DNA
tagaaggccatttttccaccctgtaggggatgccgattattttgaatacctccaagaaggtggcccagatggtgagcctgacgtgcccccgggagcgatagagcagggccccacagatga

SEQ ID NO: 9266 - DNA, 120 bp, synthetic construct
  misc_feature 1..120: note = Description of artificial sequence: synthetic polynucleotide sequence
  source 1..120: mol_type = other DNA
aggcgaggaattggccttgctattccacaatgtcgtcttacaccattgagtcgtctcccctttggaatggcccctggacccggcccacaacctggcccactaagggagtccattgtctgt

SEQ ID NO: 9267 - DNA, 120 bp, synthetic construct
  misc_feature 1..120: note = Description of artificial sequence: synthetic polynucleotide sequence
  source 1..120: mol_type = other DNA
ccctagcgactctgctggaaatgatggaggccctccacaattgacggaagaggttgaaaacaaaggaggtgaccagggcccgcctttgatgacagacggaggcggcggtcatagtcatga

SEQ ID NO: 9268 - DNA, 120 bp, synthetic construct
  misc_feature 1..120: note = Description of artificial sequence: synthetic polynucleotide sequence
  source 1..120: mol_type = other DNA
aagaggttgaaaacaaaggaggtgaccgggacccgccttcgatgacagacggtggcggcggtgatccacaccttcctacgctgcttttgggtacttctggttccggtggagatgatgacg

SEQ ID NO: 9269 - DNA, 120 bp, synthetic construct
  misc_feature 1..120: note = Description of artificial sequence: synthetic polynucleotide sequence
  source 1..120: mol_type = other DNA
atgtctgacgagggaccaggtacaggacctggaaatggcctaggacagaaggaagacacatctggaccagacggctccagcggcagtggacctcaaagaagagggggggataaccatgga

SEQ ID NO: 9270 - DNA, 120 bp, synthetic construct
  misc_feature 1..120: note = Description of artificial sequence: synthetic polynucleotide sequence
  source 1..120: mol_type = other DNA
tctcaaaacctaggcgcacctggaggtggtcctgacaatggcccacaggaccctgacaacactgatgacaatggcccacaggaccctgacaacactgatgacaatggcccacaggaccct

SEQ ID NO: 9271 - DNA, 120 bp, synthetic construct
  misc_feature 1..120: note = Description of artificial sequence: synthetic polynucleotide sequence
  source 1..120: mol_type = other DNA
cactgatgacaatggcccacatgacccgctgcctcaggaccctgacaacactgatgacaatggcccacaggaccctgacaacactgatgacaatggcccacatgacccgctgcctcatag

SEQ ID NO: 9272 - DNA, 120 bp, synthetic construct
  misc_feature 1..120: note = Description of artificial sequence: synthetic polynucleotide sequence
  source 1..120: mol_type = other DNA
ggtagaaggccatttttccaccctgtagcggaagccgattattttgaataccaccaagaaggtggcccagatggtgagcctgacatgcccccgggagcgatagagcagggccccgcagat

SEQ ID NO: 9273 - DNA, 120 bp, synthetic construct
  misc_feature 1..120: note = Description of artificial sequence: synthetic polynucleotide sequence
  source 1..120: mol_type = other DNA
cccaggagaaggcccaagcactggaccccggggtcagggtgatggaggcaggcgcaaaaaaggagggtggtttggaaagcatcgtggtcaaggaggttccaacccgaaatttgagaacat

SEQ ID NO: 9274 - DNA, 120 bp, synthetic construct
  misc_feature 1..120: note = Description of artificial sequence: synthetic polynucleotide sequence
  source 1..120: mol_type = other DNA
atgtctgacgaggggccaggtacaggacctggaaatggcctaggacagaaggaagactcatctggaccagaaggctccggcggcagtggacctcaaagaagagggggggataaccatgga

SEQ ID NO: 9275 - DNA, 120 bp, synthetic construct
  misc_feature 1..120: note = Description of artificial sequence: synthetic polynucleotide sequence
  source 1..120: mol_type = other DNA
acggaagaggttgaaaacaaaggaggtgaccggggcccgccttcgatgacagacggtggcggcggtgatccacaccttcctacgctgcttttgggtacttctggttccggtggagatgat

SEQ ID NO: 9276 - DNA, 120 bp, synthetic construct
  misc_feature 1..120: note = Description of artificial sequence: synthetic polynucleotide sequence
  source 1..120: mol_type = other DNA
aggcgaggaactgcccttgctattccacaatgtcgtcttacaccattgagtcgtctcccctttggaatggcccctggacccggcccacaacctggcccgctaagggagtccattgtctgt

SEQ ID NO: 9277 - DNA, 120 bp, synthetic construct
  misc_feature 1..120: note = Description of artificial sequence: synthetic polynucleotide sequence
  source 1..120: mol_type = other DNA
gacccaggagaaggcccaagcactggaccccggggtcagggtgatggaggcaggcgcaaaaaaggagggtggtttggaaagcatcgtggtcaaggaggttccaacccgaaatttgagaac

SEQ ID NO: 9278 - DNA, 120 bp, synthetic construct
  misc_feature 1..120: note = Description of artificial sequence: synthetic polynucleotide sequence
  source 1..120: mol_type = other DNA
gacccaggagaaggcccaagcactggaccccggggtcagggtgatggaggcaggcgcaaaaaaggagggtggtatggaaagcatcgtggtgaaggaggttccagccagaaatttgagaac

SEQ ID NO: 9279 - DNA, 120 bp, synthetic construct
  misc_feature 1..120: note = Description of artificial sequence: synthetic polynucleotide sequence
  source 1..120: mol_type = other DNA
gacgatggagtagatttgcctccctggtttccacctatggtggaaggggctgccgcggagggtgatgacggagatgacggagatgaaggaggtgatggagatgagggtgaggaagggcag

SEQ ID NO: 9280 - DNA, 120 bp, synthetic construct
  misc_feature 1..120: note = Description of artificial sequence: synthetic polynucleotide sequence
  source 1..120: mol_type = other DNA
ttccaccctgtaggggatgccgattattttgaatacctccaagaaggtggcccagatggtgagcctgacgtgcccccgggagcgatagagcagggccccacagatgacccaggagaaggc

SEQ ID NO: 9281 - DNA, 120 bp, synthetic construct
  misc_feature 1..120: note = Description of artificial sequence: synthetic polynucleotide sequence
  source 1..120: mol_type = other DNA
cgtgaaagagccagggggagaggtcgtggacgtggtgaaaagaggcccaggagtcccagtagtcagtcatcatcatccgggtctccaccgcgcaggccccctccaggtagaaggccattt

SEQ ID NO: 9282 - DNA, 120 bp, synthetic construct
  misc_feature 1..120: note = Description of artificial sequence: synthetic polynucleotide sequence
  source 1..120: mol_type = other DNA
gactccctcccgcaccctcaacaagctaccgatgattctggccatgaatctgactctaactccaacgagggcagacaccacctgctcgtgactggagccggcgacggacccccactctgc

SEQ ID NO: 9283 - DNA, 120 bp, synthetic construct
  misc_feature 1..120: note = Description of artificial sequence: synthetic polynucleotide sequence
  source 1..120: mol_type = other DNA
tggagccggcgacggacccccactctgctctcaaaacctaggcgcacctggaggtggtcctgacaatggcccacaggaccctgacaacactgatgacaatggcccacaggaccctgacaa

SEQ ID NO: 9284 - DNA, 120 bp, synthetic construct
  misc_feature 1..120: note = Description of artificial sequence: synthetic polynucleotide sequence
  source 1..120: mol_type = other DNA
cgaggacggggaagaggacgaggacgaggaggcggaagaccaggagctccgggcggctcaggatcagggccaagacatagagatggtgtccggagaccccaaaaacgtccaagttgcatt

SEQ ID NO: 9285 - DNA, 120 bp, synthetic construct
  misc_feature 1..120: note = Description of artificial sequence: synthetic polynucleotide sequence
  source 1..120: mol_type = other DNA
tggggccggcgacggacccccactctgctctcaaaacctaggcgcacctggaggtggtcctgacaatggcccacaggaccctgacaacactgatgacaatggcccacaggaccctgacaa

SEQ ID NO: 9286 - DNA, 120 bp, synthetic construct
  misc_feature 1..120: note = Description of artificial sequence: synthetic polynucleotide sequence
  source 1..120: mol_type = other DNA
ctccctcccgcaccctcaacaagctaccgacgattctagccatgaatctgactctaactccaacgagggcagacaccacctgctcgtgagtggggccggcgacggacccccactctgctc

SEQ ID NO: 9287 - DNA, 120 bp, synthetic construct
  misc_feature 1..120: note = Description of artificial sequence: synthetic polynucleotide sequence
  source 1..120: mol_type = other DNA
tatatcgttatgagtaactggactggaggagcgctccttgtcctctattcctttgctctcatgcttattattatcattctcatcatctttatcttcagaagagaccttctctgtccactt

SEQ ID NO: 9288 - DNA, 120 bp, synthetic construct
  misc_feature 1..120: note = Description of artificial sequence: synthetic polynucleotide sequence
  source 1..120: mol_type = other DNA
tatttcatggtctttttacaaactcatatatttgctgaggttttgaaggatgcgattaaggaccttgttatgacaaagcccgctcctacctgcaatatcagggtgactgtgtgcagcttt

SEQ ID NO: 9289 - DNA, 120 bp, synthetic construct
  misc_feature 1..120: note = Description of artificial sequence: synthetic polynucleotide sequence
  source 1..120: mol_type = other DNA
ttacaaactcatatatttgctgaggttttgaaggatgcgattaaggaccttgttatgacaaagcccgctcctacctgcaatatcaaggtgactgtgtgcagctttgacgatggagtagat

SEQ ID NO: 9290 - DNA, 120 bp, synthetic construct
  misc_feature 1..120: note = Description of artificial sequence: synthetic polynucleotide sequence
  source 1..120: mol_type = other DNA
tctacaacaaaactggtggactctattggttgatctcctttggctcctcctgtttctggcgattttaatctggatgtattaccatggacaacgacacagtgatgaacaccaccacgatga

SEQ ID NO: 9291 - DNA, 120 bp, synthetic construct
  misc_feature 1..120: note = Description of artificial sequence: synthetic polynucleotide sequence
  source 1..120: mol_type = other DNA
cttaggtatctggatctacttattggagatgctctggcgacttggtgccaccatctggcagcttttggccttcttcctagccttcttcctagacctcatcctgctcattattgctctcta

SEQ ID NO: 9292 - DNA, 120 bp, synthetic construct
  misc_feature 1..120: note = Description of artificial sequence: synthetic polynucleotide sequence
  source 1..120: mol_type = other DNA
attgcagaaggtttaagagttctcctggctaggagtcacgtagaaaggactaccgaggaaggaaattgggtcgccggtgtgttcgtatatggaggtagtaagacctccctttacaacctc

SEQ ID NO: 9293 - DNA, 120 bp, synthetic construct
  misc_feature 1..120: note = Description of artificial sequence: synthetic polynucleotide sequence
  source 1..120: mol_type = other DNA
attgcagaaggtttaagagctctcctggctaggagtcacgtagaaaggactaccgacgaaggaacttgggtcgccggtgtgttcgtatatggaggtagtaagacctccctttacaaccta

SEQ ID NO: 9294 - DNA, 120 bp, synthetic construct
  misc_feature 1..120: note = Description of artificial sequence: synthetic polynucleotide sequence
  source 1..120: mol_type = other DNA
gtcttaggtctctggatctacttattggagattctctggcgacttggtgccaccatctggcagcttttggccttcttcctagccttcttcctagacctcatcctgctcattattgctctc

SEQ ID NO: 9295 - DNA, 120 bp, synthetic construct
  misc_feature 1..120: note = Description of artificial sequence: synthetic polynucleotide sequence
  source 1..120: mol_type = other DNA
cttaggtctctggatctacttcttggagatcctctggcggcttggtgccaccatctggcagcttttggccttcatcctagccttcttcctagccatcatcctgcttattattgctctcta

SEQ ID NO: 9296 - DNA, 120 bp, synthetic construct
  misc_feature 1..120: note = Description of artificial sequence: synthetic polynucleotide sequence
  source 1..120: mol_type = other DNA
ccagccctaacactctttttttcaacgcagtcttaggtctctggatctacttcttggagattctctggcggcttggtgccaccatctggcagcttttggccttcatcctagccttcttcc

SEQ ID NO: 9297 - DNA, 120 bp, synthetic construct
  misc_feature 1..120: note = Description of artificial sequence: synthetic polynucleotide sequence
  source 1..120: mol_type = other DNA
caaaggaggtgaccggggcccgccttcgatgacagacggtggcggcggtgatccacaccttcctacgctgcttttgggtacttctggttccggtggagatgatgacgacccccacggccc

SEQ ID NO: 9298 - DNA, 120 bp, synthetic construct
  misc_feature 1..120: note = Description of artificial sequence: synthetic polynucleotide sequence
  source 1..120: mol_type = other DNA
cgaggacggggaagaggacgaggacgaggaggcggaagaccaggagctccgggcggctcaggagcggctcaggatcagggccaagacatagagatggtgtccggagaccccaaaaacgtc

SEQ ID NO: 9299 - DNA, 120 bp, synthetic construct
  misc_feature 1..120: note = Description of artificial sequence: synthetic polynucleotide sequence
  source 1..120: mol_type = other DNA
atggaacacgaccttgagaggggcccaccgggcccgcgacggccccctcgaggaccccccctctcctcttccctaggccttgctctccttctcctcctcttggcgctactgttttggctg

SEQ ID NO: 9300 - DNA, 120 bp, synthetic construct
  misc_feature 1..120: note = Description of artificial sequence: synthetic polynucleotide sequence
  source 1..120: mol_type = other DNA
atggaacgcgaccttgagaggggcccaccgggcccgccacggccccctctaggaccccccctctcctcttccataggccttgctctccttctcctgctcttggcgctactgttctggctg

SEQ ID NO: 9301 - DNA, 120 bp, synthetic construct
  misc_feature 1..120: note = Description of artificial sequence: synthetic polynucleotide sequence
  source 1..120: mol_type = other DNA
ggtggaggccggggtcgaggaggcagtggaggccggggtcgaggaggcagtggaggccggggtcgaggaggtagtggaggccgccggggtagaggacgtgaaagagccagggggaggagt

SEQ ID NO: 9302 - DNA, 120 bp, synthetic construct
  misc_feature 1..120: note = Description of artificial sequence: synthetic polynucleotide sequence
  source 1..120: mol_type = other DNA
tacatcgttatgagtgactggactggaggagccctccttgtcctctattcctttgctctcatacttataattataattttgatcatctttatcttcagaagagaccttctctgtccactt

SEQ ID NO: 9303 - DNA, 120 bp, synthetic construct
  misc_feature 1..120: note = Description of artificial sequence: synthetic polynucleotide sequence
  source 1..120: mol_type = other DNA
tacatcgttatgagtgactggactggaggagccctccttgtcctctattcctttgctctcatgcttataattataattttgatcatctttatcttcagaagagaccttctctgtccactt

SEQ ID NO: 9304 - DNA, 120 bp, synthetic construct
  misc_feature 1..120: note = Description of artificial sequence: synthetic polynucleotide sequence
  source 1..120: mol_type = other DNA
tatttcattgtctttttacaaactcatatatttgctgagggtttgaaggatgcgattaaggaccttgttttgccaaagcccgctcctacctgcaatatcaaggtgactgtgtgcagcttt

SEQ ID NO: 9305 - DNA, 120 bp, synthetic construct
  misc_feature 1..120: note = Description of artificial sequence: synthetic polynucleotide sequence
  source 1..120: mol_type = other DNA
cacgacacactgatgaacaccaccacgatgactccctcccgcaccctcaacaagctaccgacgattctagccatgaatctgactctaactccaacgagggcagacaccacctgctcgtga

SEQ ID NO: 9306 - DNA, 120 bp, synthetic construct
  misc_feature 1..120: note = Description of artificial sequence: synthetic polynucleotide sequence
  source 1..120: mol_type = other DNA
gcgaggaattgcccttgctgttccacaatgtcgtattacaccattgagtcgtctcccctttggaatggcccctggacccggcccacaacctggcccactaagggagtccattgtctgtta

SEQ ID NO: 9307 - DNA, 120 bp, synthetic construct
  misc_feature 1..120: note = Description of artificial sequence: synthetic polynucleotide sequence
  source 1..120: mol_type = other DNA
gcctcaggaccctgacaacactgatgacaatggcccacaggaccctgacaacactgatgacaatggcccacatgacccgctgcctcatagccctagcgactctgctggaaatgatggagg

SEQ ID NO: 9308 - DNA, 120 bp, synthetic construct
  misc_feature 1..120: note = Description of artificial sequence: synthetic polynucleotide sequence
  source 1..120: mol_type = other DNA
atgtctgacgaggggccaggtacaggacctggaaatggcctaggagagaagggagacacatctggaccagaaggctccggcggcagtggacctcaaagaagagggggtgataaccatgga

SEQ ID NO: 9309 - DNA, 120 bp, synthetic construct
  misc_feature 1..120: note = Description of artificial sequence: synthetic polynucleotide sequence
  source 1..120: mol_type = other DNA
ggtagaaggccatttttccaccctgtaggggaagccgattattttgaataccaccaagaaggtggcccagatggtgagcctgacgtgcccccgggagcgatagagcagggccccgcagat

SEQ ID NO: 9310 - DNA, 120 bp, synthetic construct
  misc_feature 1..120: note = Description of artificial sequence: synthetic polynucleotide sequence
  source 1..120: mol_type = other DNA
cgaggacggggaagaggacgaggacgaggaggcggaagaccaggagccccgggcggctcaggatcagggccaagacatagagatggtgtccggagaccccaaaaacgtccaagttgcatt

SEQ ID NO: 9311 - DNA, 120 bp, synthetic construct
  misc_feature 1..120: note = Description of artificial sequence: synthetic polynucleotide sequence
  source 1..120: mol_type = other DNA
gccagggggggaagtcgtgaaagagccagggggagaggtcgtggacgtggagaaaagaggcccaggagtcccagtagtcagtcatcatcatccgggtctccaccgcgcaggccccctcca

SEQ ID NO: 9312 - DNA, 120 bp, synthetic construct
  misc_feature 1..120: note = Description of artificial sequence: synthetic polynucleotide sequence
  source 1..120: mol_type = other DNA
gccagggggaggagtcgtgaaagagccagggggagaggtcgtggacgtggtgaaaagaggcccaggagtcccagtagtcagtcatcatcatccgggtctccaccgcgcaggccccctcca

SEQ ID NO: 9313 - DNA, 120 bp, synthetic construct
  misc_feature 1..120: note = Description of artificial sequence: synthetic polynucleotide sequence
  source 1..120: mol_type = other DNA
ccagccctaacactcttttttcaacgcagtcttaggtctctggatctacttcttggagattctctggcggcttggtgccaccatctggcagcttttggccttcatcctagccttcttcct

SEQ ID NO: 9314 - DNA, 120 bp, synthetic construct
  misc_feature 1..120: note = Description of artificial sequence: synthetic polynucleotide sequence
  source 1..120: mol_type = other DNA
tatttcatggtctttttacaaactcatatatttgctgaggttttgaaggatgcgattaaggaccttgttatgacaaagcccgctcctacctgcaatatcaaggtgactgtgtgcagcttt

SEQ ID NO: 9315 - DNA, 120 bp, synthetic construct
  misc_feature 1..120: note = Description of artificial sequence: synthetic polynucleotide sequence
  source 1..120: mol_type = other DNA
tatatcgttctgagtaactggactggaggagcgctccttgtcctctattcctttgctctcatgcttattattatcattctcatcatctttatcttcagaagagaccttctctgtccactt

SEQ ID NO: 9316 - DNA, 120 bp, synthetic construct
  misc_feature 1..120: note = Description of artificial sequence: synthetic polynucleotide sequence
  source 1..120: mol_type = other DNA
agccatcatcctgcttattattgctctctatctacaacaaaactggtggactctattggttgatctcctttggctcctcctgtttatggccattttaatctggatgtattatcatggacc
